(19) United States
(12) Patent Application Publication
(10) Pub. No.: US 2008/0038723 A1
(43) Pub. Date: Feb. 14, 2008

(54) Functional assessment of DNA mismatch repair gene variants

(76) Inventors: Grant A. Bitter, Agoura, CA (US); Aaron R. Ellison, Thousand Oaks, CA (US)

Correspondence Address: Richard J. Mazza;c/o BitTech, Inc., P.O. Box 1499, Agoura Hills, CA, 91376-1499, US

(21) Appl. No.: 10/863,872

(22) Filed: Jun. 7, 2004

(51) Int. Cl. C12Q 1/68; C07K 14/395; C12N 1/19; C12N 15/31

(52) U.S. Cl. 435/6; 435/254.21; 436/94; 530/358; 536/23.74

(57) ABSTRACT

Methods and materials are described for determining the susceptibility of an individual to diseases associated with defects in DNA mismatch repair function, principally human colorectal and other cancers, by the use of activity assays to assess the functional significance of mutations in genes encoding DNA mismatch repair proteins. These methods allow the prospective identification of amino acid substitutions, corresponding to naturally occurring genetic mutations, which impair human DNA mismatch repair function and may lead to oncogenic consequences. Certain irregular sequences encoding protein sequences that differ from native DNA mismatch repair proteins, and which may foretell a higher probability for developing cancer and other genetically based diseases, have been now been newly identified by these methods.

### ACKNOWLEDGEMENT

[0001] Work taking place in the laboratory when this invention occurred was supported in part by a research grant from the National Institutes of Health (R44CA81965). The U.S. Government may have rights in this invention as a result of this support.

### BACKGROUND OF THE INVENTION

[0002] 1. Technical Field

[0003] This invention relates to the diagnosis in humans of susceptibility to the development of colorectal cancer and other diseases associated with the loss of function in DNA mismatch repair in vivo.

[0004] 2. Background

[0005] Hereditary nonpolyposis colorectal cancer (HNPCC) is an autosomal dominant inherited disease caused by defects in the process of DNA mismatch repair, and mutations in the hMLH1 or hMSH2 genes are responsible for the majority of HNPCC. In addition to clear loss-of-function mutations conferred by nonsense or frameshift alterations in the coding sequence or by splice variants, genetic screening has revealed a large number of missense codons with less obvious functional consequences. The ability to discriminate between a loss-of-function mutation and a silent polymorphism (i.e. no apparent loss of function) is important for genetic testing for inherited diseases like HNPCC where there exists opportunity for early diagnosis and preventive intervention.

[0006] Colorectal cancer (CRC) is one of the most common cancers, by some estimates affecting 3-5% of the population in developed countries by age 70. Hereditary nonpolyposis colorectal cancer (HNPCC) accounts for 2-8% of all CRC, depending on the population and clinical criteria used, and is manifested by a high rate of mortality in the absence of early detection and treatment (reviewed in: (1-6). Diagnosis of HNPCC in a family is based on kindred analysis using the Amsterdam Criteria (7), which require: i) three or more family members to have had histologically verified CRC, with one being a first-degree relative of the other two, ii) CRC in at least two generations, and iii) at least one individual diagnosed with CRC before age 50. At the molecular level, HNPCC is associated with defects in the cellular process of DNA mismatch repair.

[0007] The process of DNA mismatch repair (corrects non-native (i.e., irregular or mutant) DNA structures that form primarily during DNA replication. These aberrant structures include incorrectly paired bases resulting from misincorporation by DNA polymerases, as well as insertion/deletion loops in DNA which form, for example, as a result of microsatellite instability. Microsatellite sequences comprise a tract of repetitive nucleotides within a DNA sequence, for example, -GGGGGGGGGGGG- or -ACACACACAC-. In cells with dysfunctional MMR, microsatellite sequences are highly unstable and thus are prone to mutate during DNA replication. The amino acid sequences of MMR protein functional domains are conserved from E. coli to humans, and the eukaryotic MMR proteins are named based on their homology to E. coli MutS and MutL. Mechanistic studies of MMR in yeast and human cells have elucidated similar processes (reviewed in (8-10)). MutSα is a heterodimer of MSH2 and MSH6, while MutSβ is a heterodimer of MSH2 and MSH3. MutSα recognizes base:base mismatches, as well as single base insertion/deletion mispairs. MutSβ also recognizes single base insertion/deletion mispairs but is primarily responsible for recognition of larger insertion/deletion mispairs. Heterodimers of the MutL homologues bind to the MutSα or MutSβ DNA mismatch complex to effect repair. The yeast MLH1-PMS1 heterodimer (MLH1-PMS2 in humans) binds both MutSα and MutSβ, while the yeast MLH1-MLH3 complex (MLH1-PMS1 in humans) binds MutS, (reviewed in (10)).

[0008] HNPCC has been shown to be caused by mutations in the hMLH1, hMSH2, hPMS1, hPMS2, hMLH3 and hMSH6 genes (5). Hundreds of mutations of all types have been described with approximately 90% occurring in either hMLH1 or hMSH2. It is probable that the majority of HNPCC is associated with mutations in hMLH1 and hMSH2 since inactivation of either of these genes results in impaired replication of a broad spectrum of mismatches (single base:base mismatches and both small and large insertion/deletion loops). The most comprehensive public database of sequence alterations observed in genes encoding human MMR proteins and implicated in HNPCC is the International Collaborative Group (ICG) on HNPCC (http://www.nfdht.nl). Additional sequence variants which have been observed also appear in the Human Gene Mutation Database (http://www.hgmd.org) and the Swiss Protein Database (http://us.expasy.org) as well as several single nucleotide polymorphism (SNP) databases (http://dir-apps.niehs.nih.gov/egsnp/, http://www.genome.utah.edu/genesnps/, http://www.ncbi.nlm.nkh.gov/SNP). In addition to mutations in hMLH1 and hMSH2, it has been reported that defects in MMR can be caused by gene silencing due to hypermethylation (11). Genetic testing of individuals in HNPCC kindreds should decrease cancer-associated morbidity and mortality in this group. Removal of pre-cancer polyps observed during colonoscopy is highly effective in preventing the progression of nonpolyposis colorectal cancer. By identification of those individuals with MMR defects in HNPCC kindreds, routine colonoscopies can be performed with, and restricted to, those individuals who will derive benefits from the procedure.

[0009] In the genetic analyses of HNPCC kindreds, more than 25% of the gene alterations observed are minor variants such as amino acid substitutions or small in-frame deletions. These sequence variants, furthermore, are scattered throughout the gene coding region. If an observed amino acid replacement can be shown to segregate with disease in the affected family, it suggests that the amino acid substitution is an inactivating mutation. Frequently, however, small family size or unavailability of clinical samples has precluded attempts to correlate the amino acid replacement with pathogenic effect. As genetic analyses of HNPCC kindreds has continued, an increasing number of minor variants have been documented. To date, missense codons resulting in 164 different amino acid substitutions have been described in hMLH1 while 150 have been reported in hMSH2. It is now generally acknowledged (3, 6, 9, 12) that accurate and effective genetic testing for HNPCC will require methods to determine the functional significance of these minor variants, since the utility of genetic tests is severely compromised if there is any ambiguity in the results.

[0010] It is now clear that cancer is an acquired disease in which cells evolve in a stepwise manner from a normal state to premalignancy to invasiveness (13, 14). This progression (tumorigenesis) is likely to occur over long periods of time (typically, 15-30 years), and it results in age-dependent increases in cancer incidence. As cancer cells divide they acquire the necessary capabilities for self-sufficiency in growth signals, insensitivity to anti-growth signals, protection from apoptosis, limitless replicative potential (immortality), sustained angiogenesis, and tissue invasiveness (14). While the order and biological mechanisms for the acquired capabilities may vary, one universal characteristic of cancer cells is that their genomes contain a large number of mutations (15-18). These mutations appear to lay the genetic foundation for the acquisition of capabilities that permit tumorigenesis.

[0011] Although it has been debated whether elevated mutation rates are essential for tumorigenesis, it is generally agreed that events which increase the number of mutations in a cell will lead to an increased risk of developing cancer. This correlation between the acquisition of mutations, either at the nucleotide sequence or chromosomal level, and tumorigenesis is well-established and the basis for currently-recommended practices in cancer avoidance and prevention. For example, there is a causal link between exposure to physical and chemical mutagens (such as tobacco products, ultraviolet light, and radioactivity) and tumorigenesis (19-21). At the biochemical level these mutagens are known to cause DNA damage and to alter a cell's genetic information in ways that appear to facilitate tumorigenesis. Also, an accumulation of mutations may occur via malfunctioning DNA repair pathways. Normally, cells have several mechanisms for preserving their genetic integrity, including MMR, nucleotide excision repair, base excision repair, double-strand break repair, and photoreactivation. These mechanisms are necessary for dealing with the errors that occur at a low frequency through normal cellular metabolism, DNA replication and the environment. However, if cells are not able to repair damaged DNA, the altered DNA sequence, i.e., a mutation, becomes an enduring feature in cells of that lineage. Therefore, conditions which decrease the efficiency of DNA repair (i.e., increase the frequency at which mutations accumulate) will undoubtedly increase the likelihood that cells will more rapidly acquire the capabilities necessary for tumorigenesis. Proof of these principles has been borne out most convincingly in humans by the discovery of certain inherited cancer-susceptibility syndromes, in which individuals that carry germline mutations in the genes for DNA repair have a much greater susceptibility to develop cancer than individuals in the general population. For example, patients with xeroderma pigmentosum (XP) have been shown to carry defects in the genes encoding factors for nucleotide excision repair (22). These patients have an increased risk [to develop] of developing skin cancer as a result of being unable to repair the DNA lesions caused by exposure to UV light. As described in detail previously, patients with HNPCC carry mutations in the genes encoding proteins that carry out M (including MSH2, MLH1, and MSH6). These patients have an increased risk of developing colorectal, endometrial and other types of cancers as a result of being unable to carry out MMR. Taken together, these fundamental concepts establish a causative link between events that increase the number of mutations in a cell and the potential for those cells to acquire the essential capabilities for tumorigenesis and thus greaten an individual's susceptibility to cancer development.

### SUMMARY OF THE INVENTION

[0012] The present invention provides for the identification of certain partial or complete inactivations of human genes encoding proteins involved in DNA mismatch repair. This identification is carried out by use of quantitative in vivo DNA mismatch repair assays (utilizing the yeast Saccharomyces cerevisiae, for example) which determine the functional significance of amino acid substitutions observed in humans.

[0013] This invention features a diagnostic method for determining whether an individual, i.e., a human subject, carries a mutation in a gene which encodes a protein involved in DNA mismatch repair. In general, the approach is based on an in vivo functional analysis of variant DNA mismatch repair genes which have been introduced into cells of the yeast Saccharomyces cerevisiae that lack a functional copy of the corresponding native DNA mismatch repair gene. This method differs from work described earlier (WO 02/081624 A3, published Oct. 17, 2002) by featuring a new approach for the prospective identification of MMR gene variants having inactivating missense mutations (described in greater detail further below in this text), and new hybrid human-yeast DNA molecules for the analysis of human sequence alterations in yeast. Cumulatively, 180 mismatch repair protein variants, each having one amino acid substitution compared to the wild-type sequence, have been developed and assayed for function in DNA mismatch repair. The present method is useful for the diagnosis of presusceptibility to diseases that are associated with defects in MMR function, a notable example of which is cancer.

[0014] In general, in one of its primary aspects the present invention provides a diagnostic method for determining whether a human subject has an increased rate of accumulating genetic mutations due to the loss of DNA mismatch repair function associated with any of the following amino acid sequences:

[0015] sequences corresponding to human MLH1: 23D (SEQ ID NO: 262), 29I (SEQ ID NO: 263), 38T (SEQ ID NO: 264), 40F (SEQ ID NO: 265), 40N (SEQ ID NO: 266), 40T (SEQ ID NO: 267), 41E (SEQ ID NO: 268), 41G (SEQ ID NO: 269), 41N (SEQ ID NO: 270), 42E (SEQ ID NO: 271), 42T (SEQ ID NO: 272), 42V (SEQ ID NO: 273), 43A (SEQ ID NO: 274), 43D (SEQ ID NO: 275), 43E (SEQ ID NO: 276), 43F (SEQ ID NO: 277), 43H (SEQ ID NO: 278), 43I (SEQ ID NO: 279), 43L (SEQ ID NO: 280), 43M (SEQ ID NO: 281), 43P (SEQ ID NO: 282), 43S (SEQ ID NO: 283), 43T (SEQ ID NO: 284), 43V (SEQ ID NO: 285), 43W (SEQ ID NO: 286), 43Y (SEQ ID NO: 287), 44D (SEQ ID NO: 288), 44G (SEQ ID NO: 289), 44K (SEQ ID NO: 290), 44M (SEQ ID NO: 291), 44N (SEQ ID NO: 292), 45I (SEQ ID NO: 293), 46T (SEQ ID NO: 294), 47S (SEQ ID NO: 295), 47T (SEQ ID NO: 296), 48G (SEQ ID NO: 297), 48Y (SEQ ID NO: 298), 49E (SEQ ID NO: 299), 49M (SEQ ID NO: 300), 49N (SEQ ID NO: 301), 51A (SEQ ID NO: 302), 51D (SEQ ID NO: 303), 55S (SEQ ID NO: 304), 56M (SEQ ID NO: 305), 56P (SEQ ID NO: 306), 57N (SEQ ID NO: 307), 59F (SEQ ID NO: 308), 59H (SEQ ID NO: 309), 59N (SEQ ID NO: 310), 59T (SEQ ID NO: 311), 61N (SEQ ID NO: 312), 63G (SEQ ID NO: 313), 63Y (SEQ ID NO: 314), 64I (SEQ ID NO: 315), 64S (SEQ ID NO: 316), 65A (SEQ ID NO: 317), 65D (SEQ ID NO: 318), 65E (SEQ ID NO: 319), 65S (SEQ ID NO: 320), 65V (SEQ ID NO: 321), 67W (SEQ ID NO: 322), 68F (SEQ ID NO: 323), 68N (SEQ ID NO: 324), 68S (SEQ ID NO: 325), 70I (SEQ ID NO: 326), 70N (SEQ ID NO: 327), 72G (SEQ ID NO: 328), 73M (SEQ ID NO: 329), 73P (SEQ ID NO: 330), 74L (SEQ ID NO: 331), 76E (SEQ ID NO: 332), 77S (SEQ ID NO: 333), 77Y (SEQ ID NO: 334), 79W (SEQ ID NO: 335), 80I (SEQ ID NO: 336), 80S (SEQ ID NO: 337), 80V (SEQ ID NO: 338), 82K (SEQ ID NO: 339), 82M (SEQ ID NO: 340), 82S (SEQ ID NO: 341), 83F (SEQ ID NO: 342), 83P (SEQ ID NO: 343), 89G (SEQ ID NO: 344), 89V (SEQ ID NO: 345), 91V (SEQ ID NO: 346), 99I (SEQ ID NO: 347), 99L (SEQ ID NO: 348), 100P (SEQ ID NO: 349), 100Q (SEQ ID NO: 350), 101D (SEQ ID NO: 351), 102D (SEQ ID NO: 352), 102G (SEQ ID NO: 353), 103T (SEQ ID NO: 354), 103V (SEQ ID NO: 355), 111P (SEQ ID NO: 356), 111T (SEQ ID NO: 357), 113A (SEQ ID NO: 358), 114I (SEQ ID NO: 359), 115E (SEQ ID NO: 360), 115F (SEQ ID NO: 361), 115N (SEQ ID NO: 362), 115S (SEQ ID NO: 363), 116A (SEQ ID NO: 364), 118N (SEQ ID NO: 365), 128P (SEQ ID NO: 366), 182G (SEQ ID NO: 367), 193P (SEQ ID NO: 368), 304V (SEQ ID NO: 601), 542P (SEQ ID NO: 369), 549P (SEQ ID NO: 370), 640S (SEQ ID NO: 602), 663G (SEQ ID NO: 371), 755S (SEQ ID NO: 372), 22A (SEQ ID NO: 598), 29S (SEQ ID NO: 373), 32V (SEQ ID NO: 374), 36L (SEQ ID NO: 375), 43C (SEQ ID NO: 376), 43G (SEQ ID NO: 377), 43N (SEQ ID NO: 378), 43Q (SEQ ID NO: 379), 43R (SEQ ID NO: 380), 62R (SEQ ID NO: 381), 64D (SEQ ID NO: 382), 71D (SEQ ID NO: 383), 75T (SEQ ID NO: 384), 95T (SEQ ID NO: 385), 136S (SEQ ID NO: 386), 141R (SEQ ID NO: 599), 160V (SEQ ID NO: 387), 272V (SEQ ID NO: 388), 286Q (SEQ ID NO: 600), 441T (SEQ ID NO: 389), 648L (SEQ ID NO: 390), and 659Q (SEQ ID NO: 391).

[0016] sequences corresponding to human MSH2: 100/101-del (SEQ ID NO: 604), 198G (SEQ ID NO: 392), 199R (SEQ ID NO: 400), 272V (SEQ ID NO: 393), 333R (SEQ ID NO: 90), 338R (SEQ ID NO: 607), 439-del (SEQ ID NO: 609), 440P (SEQ ID NO: 610), 503P (SEQ ID NO: 394), 534C (SEQ ID NO: 611), 595R (SEQ ID NO: 614), 603N (SEQ ID NO: 615), 622T (SEQ ID NO: 616), 636P (SEQ ID NO: 99), 639R (SEQ ID NO: 93), 683R (SEQ ID NO: 395), 692R (SEQ ID NO: 95), 697R (SEQ ID NO: 96), 751R (SEQ ID NO: 97), 30L (SEQ ID NO: 603), 44M (SEQ ID NO: 396), 61P (SEQ ID NO: 397), 127S (SEQ ID NO: 398), 167H (SEQ ID NO: 399), 186S (SEQ ID NO: 89), 199W (SEQ ID NO: 605), 322V (SEQ ID NO: 606), 323C (SEQ ID NO: 401), 333Y (SEQ ID NO: 91), 349L (SEQ ID NO: 608), 390F (SEQ ID NO: 402), 390V (SEQ ID NO: 403), 562V (SEQ ID NO: 612), 583S (SEQ ID NO: 613), 609V (SEQ ID NO: 92), 647K (SEQ ID NO: 100), 656H (SEQ ID NO: 101), 683V (SEQ ID NO: 404), 688I (SEQ ID NO: 405), 691T (SEQ ID NO: 94), 722I (SEQ ID NO: 617), 729V (SEQ ID NO: 102), 735V (SEQ ID NO: 406), 770V (SEQ ID NO: 98), and 845E (SEQ ID NO: 407).

[0017] This diagnostic method is especially useful in practical applications for determining whether a human subject has an increased susceptibility to the development of cancer (e.g., colorectal, endometrial, ovarian) associated with loss of DNA mismatch repair function by determining whether that subject possesses a gene which encodes a DNA mismatch repair protein having any of the above mentioned amino acid sequences and detecting if that sequence is an inactivating mutation or an efficiency polymorphism, either of which carries a greater than normal risk of cancer development.

[0018] Other aspects of the invention include biological and biochemical materials which are useful in the practice of the methods of the invention. These materials and their application are described in detail further below.

### BRIEF DESCRIPTION OF THE FIGURES

[0019] FIG. 1 is a schematic representation of proteins encoded by the hybrid human-yeast MLH1 genes. Portions of the hybrid representing human sequences are represented with filled bars. Numbers above each bar indicate the corresponding amino acid residues at the junction between human and yeast sequences. The MMR defect (normalized to the strain expressing wild-type yeast MLH1) is listed to the right of each protein.

[0020] FIG. 2 is a schematic representation of proteins encoded by the hybrid human-yeast MSH2 genes. Portions of the hybrid representing human sequences are represented with filled bars. Numbers above each bar indicate the corresponding amino acid residues at the junction between human and yeast sequences. The MMR defect (normalized to the strain expressing wild-type yeast MSH2) is listed to the right of each protein. The indication “ins9” refers to an insertion of the yeast MSH2 coding sequence for amino acids 827-KNLKEQKHD-835 between human residues 807-808.

[0021] FIG. 3 is comprised of two parts. FIG. 3A shows the sequence of the 5′ end of the ADE2-MS3 reporter gene. The microsatellite (AC)₁₉A(G)₁₈ was introduced between the ATG initiator codon and the second codon (GAT) of the native ADE2 gene as described in Example 6. The fragment was transformed into strain into YBT24, replacing the native ADE2 locus to generate strain YBT41. FIG. 3B is schematic representation of the prospective screen (Methods “a” and “b”; Example 8) for inactivating mutations in MLH1. Fragments of the human-yeast hybrid genes pMLH1_h(41-86) or pMLH1_h(77-134) were generated by error-prone PCR, mixed with a ClaI-AatII-digested pMLH1 expression vector transformed into strain YBT41. Circular plasmids are formed in vivo by homologous recombination between the PCR product and gapped vector, and transformants are selected on plates lacking histidine and containing low concentrations of adenine. Clones with mutant mlh1 genes are identified by red sectoring and the plasmids are recovered to determine the DNA sequence of the mutagenized gene.

[0022] FIG. 4 comprises four photographs of yeast strain YBT41. Each photograph shows YBT41 following transformation with a different MLH1 expression vector and growth on plates containing low adenine (4 μg/ml). As, indicated above each panel, yeast YBT41 was transformed with the expression vector pMETc, containing no MLH1 gene; pMLH1, which contains the wild-type yeast MLH1 gene; and pMLH1_h(41-86) or pMLH1_h(77-134), which contain a hybrid human-yeast MLH1 gene. White colonies with red sectoring indicates a high level of microsatellite instability (mutation to ade2; mutant cells are red due to an accumulation of an intermediate in adenine biosynthesis).

[0023] FIG. 5. Yeast strain YBT24 containing pSH91 was transformed with pMLH1_h(41-86), pMLH1_h(77-134), variants of these plasmids isolated in the prospective screen and the expression vector pMETc lacking an MLH1 gene. Mutation frequencies were determined using the standardized quantitative MMR assay as described in Example 1. The mean mutation frequency ±standard deviation of two independent cultures is shown. The species (“human” or “yeast”, in parenthesis) indicates whether the missense mutation is in the human or yeast portion of the hybrid. FIG. 5A: Mutation frequencies of pMLH1_h(41-86) variants and controls: pMLH1_h(41-86) S44F (human), 2.7×10⁻³; I47S (human), 2.3×10⁻³; L56P (human), 2.7×10⁻³; I59T (human), 2.1×10⁻³; D63Y (human), 2.3×10⁻³; I68N (human), 2.5×10⁻³; V110A (yeast), 2.4×10⁻³; pMLH1_h(41-86), 2.9×10⁻⁴; pMETc, 2.3×10⁻³. FIG. 5B: Mutation frequencies of pMLH_h(77-134) variants and controls: pMLH1_h(77-134) L56H (yeast), 2.5×10⁻³; N61S (yeast), 3.2×10⁻³; G62E (yeast), 3.6×10⁻³; A103T (human), 2.0×10⁻³; T114I (human), 2.0×10⁻³; T115S (human), 3.4×10⁻³; K118N (human), 4.6×10⁻³; pMLH1_h(77-134), 1.4×10⁻⁴; pMETc, 2.0×10⁻³.

[0024] FIG. 6 shows an alignment of MLH1 orthologs and the position of all loss-of-MMR function missense mutations isolated in the prospective screen. The 117 unique substitutions isolated are represented above the appropriate residue in the human sequence. N-terminal MLH1p sequences from human (Hs, H. sapiens), mouse (Mm, M. musculus), rat (Rn, R. norvegicus), fruit fly (Dm, D. melanogaster), yeast (Sc, S. cerevisiae and Sp, S. pombe), plant (At, A. thaliana), flatworm (Ce, C. elegans), and bacteria (Sa, S. aureus and Ec, E. coli) were aligned using ClustalW (http://www.ebi.ac.uk/clustalw/). Conserved residues are highlighted. Structural features, including α-helices (stippled boxes) and β-strands (arrows), in the E. coli MutL polypeptide (23) are indicated below the alignment. Barbells represent the location of the ATP binding motifs (I-IV), which are conserved in GHL ATPases (23, 24). Underlined residues represent sites having nonsynonomous polymorphisms which may predispose individuals to develop HNPCC. Boxed residues (substitutions) were isolated in this study and are equivalent to substitutions found in the human population and associated with HNPCC (http://www.nfdht.nl).

[0025] FIG. 7 depicts mutation frequencies conferred by missense substitutions at human MLH1p residue 44 (S44). Yeast strain YBT24 containing pSH91 was transformed with pMLH1_h(41-86), variants of this plasmid containing the indicated mutation and the expression vector pMETc lacking an MLH1 gene. Mutation frequencies were determined using the standardized quantitative MMR assay as described in Example 1. The mean mutation frequency ±standard deviation of two to twelve independent cultures is shown. Cells containing the parental hybrid pMLH1_h(41-86) exhibited a mutation frequency of 2.7×10⁻⁴. The mutation defect (shown above each bar) for each variant and control was calculated by dividing the mutation frequency of cells expressing the variant by the mutation frequency of cells expressing parental hybrid pMLH1_h(41-86). A MLH1_h(41-86) gene containing a termination codon at position 44 and 45 is referred to as “S44-Term”.

[0026] FIG. 8 depicts mutation frequencies conferred by missense substitutions at human MLH1p residue 43 (K43). Yeast strain YBT24 containing pSH91 was transformed with pMLH1_h(41-86), variants of this plasmid containing the indicated mutation and the expression vector pMETc lacking an MLH1 gene. Mutation frequencies were determined using the standardized quantitative MMR assay as described in Example 1. The mean mutation frequency ±standard deviation of two to nine independent cultures is shown. Cells containing the parental hybrid pMLH1_h(41-86) exhibited a mutation frequency of 2.3×10⁻⁴. The mutation defect (shown above each bar) for each variant and control was calculated by dividing the mutation frequency of cells expressing the variant by the mutation frequency of cells expressing parental hybrid pMLH1_h(41-86). MLH1_h(41-86) genes containing spontaneous nucleotide deletions in codon 43 (an A-deletion) and 45 (a CA-deletion) are referred to as “frameshift-1” and “−2”, respectively.

### DETAILED DESCRIPTION OF THE INVENTION

[0027] As mentioned, the invention includes methods for the use of protein sequences (and the gene sequences encoding the proteins) to diagnose an individual's susceptibility to develop cancer as compared to a normal individual (or that same individual's risk if they carried two wild-type copies of the mismatch repair gene). A “normal” individual is a human subject that carries two copies of the wild-type DNA mismatch repair gene or carries one copy of the wild-type gene and one copy of a known silent polymorphism. Cancer susceptibility is defined as the lifetime risk to develop cancer and may be based in part on age, sex, ethnicity, environmental factors, and genetic risk factors.

[0028] A method is described herein for the prospective identification of DNA mismatch repair proteins having an amino acid substitution which impairs DNA mismatch repair. The method includes the steps of generating DNA mismatch repair genes with random sequence alterations, introducing these genes into appropriate host cells, functionally analyzing these genes in vivo, identifying any inactivating alterations, and making a quantitative assessment of the level to which DNA mismatch repair is effected thereby. This method involves the use of a new DNA molecule having an in-frame microsatellite tract in the native yeast ADE2 gene (ADE2::MS3::ADE2 allele). The method also includes yeast strains which carry the ADE2::MS3::ADE2 allele and are deficient in MMR gene function via specific deletions of a native DNA mismatch repair gene. As described below (in Examples 6, 7 and 8) the method provides a basis for the direct visual assessment of DNA mismatch repair function based on the examination of the color of yeast colonies.

[0029] A method has been described previously in the aforementioned patent application WO 02/081624 A3 for the analysis of human missense alterations using a DNA molecule encoding a yeast protein involved in DNA mismatch repair in which a portion of the coding sequence has been replaced with the homologous coding sequence of the human orthologue to produce a hybrid human-yeast gene that retains function in DNA mismatch repair in vivo. In contrast, the present method features the use of new DNA molecules which encode additional portions of human DNA mismatch repair genes. Specifically, yeast proteins containing portions of human MLH1 amino acids 175-341 and human MSH2 amino acids 621-862 are described and shown to retain function for DNA mismatch repair in yeast cells deficient in the corresponding native DNA mismatch repair gene. Also, a method for the use of the new human-yeast hybrids to examine human missense alterations is disclosed herein.

[0030] In one embodiment of the method of this invention, human-yeast hybrid genes having random sequence alterations are tested in a prospective screen to identify novel human missense alterations which impair MMR gene function. In another embodiment of the method, previously observed human gene alterations which confer an uncertain functional significance are recapitulated in the human-yeast hybrids and tested for their effects on gene function.

[0031] The present disclosure details the use the aforementioned methods, as well as methods described previously (see WO 02/081624 A3), to generate and determine the function of some 180 DNA mismatch repair proteins, each one having one amino acid substitution. The 180 variants are classified according to those that confer upon an individual a greater than normal susceptibility to develop cancer or, alternatively, no greater than normal susceptibility to develop cancer (see Table 1).

[0032] An important feature of this invention is a method for the diagnosis of susceptibility to cancer development based on the sequence of an individual's DNA mismatch repair gene and the known functional consequence of any alteration on DNA mismatch repair. The methods of the invention provide an approach for classifying amino acid substitutions by the degree of risk they confer, because the methods described permit a quantitative measure of DNA mismatch repair function. Thus, amino acid substitutions (or missense changes in the nucleic acid sequence) are classified as “silent polymorphisms”, i.e., conferring upon an individual no greater susceptibility to develop cancer compared to a normal individual, “efficiency polymorphisms”, i.e., conferring upon an individual a greater than normal susceptibility to develop cancer (and which can also be characterized as a “medium” risk), and “inactivating mutations”, i.e., conferring upon an individual a relatively high susceptibility to develop cancer compared to a normal individual. The methods of this invention can be used in a diagnostic test setting to evaluate predisposition to the onset of cancer in a human subject and to classify that individual's risk compared to a normal individual.

[0033] Another feature of this invention encompasses any of the aforementioned methods for analysis of, but not limited to, variants of the hMSH2, hMSH3, hMSH4, hMSH6, hMLH1, hMLH3, hPMS1 and hPMS2 genes.

[0034] In addition to new technology and methods described below, the investigations leading to the present invention use technology and methods described previously (WO 02/081624 A3). A quantitative in vivo assay of DNA mismatch repair was developed in the lower eukaryote Saccharomyces cerevisiae (a yeast) and this technology was shown to be capable of distinguishing DNA mismatch repair proteins containing silent amino acid substitutions from those containing “mutations” (i.e., functionally inactivating substitutions). Here, the yeast system has been adapted and extended determine the functional consequence of additional amino acid substitutions. The information generated with this technology will be useful for unambiguous genetic testing for HNPCC. The methods described demonstrate the usefulness of measuring the function of MMR proteins in vivo. The invention disclosed here further demonstrates the existence of a novel class of amino acid substitutions that result in proteins which are functional in MMR, but which impair efficiency relative to the native protein. This class of variant MMR proteins is referred to as “efficiency polymorphisms”. Some of these amino acid substitutions have been observed in individuals with “sporadic” (i.e., non-familial) colorectal cancer, suggesting that individuals in the general human population may indeed have different efficiencies of DNA mismatch repair due to common polymorphisms. The efficiency polymorphisms discovered with this invention, as well as those that can be identified in the future using this invention, are predictive of individual differences in susceptibility to develop cancer. Individuals in the general population may thus be screened for cancer susceptibility as a result.

[0035] In the described study delineated further herein, missense codons previously observed in human genes were introduced at the homologous residue in the yeast MLH1 (SEQ ID NO: 29) or MSH2 (SEQ ID NO: 203) genes. In addition, genes which encode functional hybrid human-yeast MLH1 and MSH2 proteins have been constructed, and they have been used to evaluate missense codons at positions which are not conserved between yeast and humans. Three classes of missense codons have thus been found: (1) complete loss-of-function, i.e. mutations; (2) variants indistinguishable from wild-type protein, i.e. silent polymorphisms; and (3) functional variants which support MMR at reduced efficiency i.e. efficiency polymorphisms. There is a good correlation between the functional results in yeast and available human clinical data regarding penetrance of the missense codon. The discovery of efficiency polymorphisms, some of which did not appear to be associated with HNPCC, raises the possibility that differences in the efficiency of DNA mismatch repair exist between individuals in the human population due to common polymorphisms, and that such polymorphisms predispose to early onset of cancer development.

[0036] In brief, the present invention provides a diagnostic approach for diseases, such as HNPCC, that are associated with defects in MMR and provides a method for determining whether any specific genetic sequence of a gene associated with MMR that differs from a consensus sequence is a mutation (i.e., non-functional protein), a silent polymorphism (i.e., normal protein function) or an efficiency polymorphism (i.e., functional protein with reduced efficiency in MMR). The invention enables the generation of databases of the functional significance of specific amino acid substitutions on MMR protein function in vivo. Such databases will allow accurate and unambiguous interpretation of genetic tests of MMR.

[0037] A novel prospective screen for the identification of novel inactivating amino acid substitutions in DNA mismatch repair proteins is described. In brief, the screen is based on the random mutagenesis of a test sequence and the expression of that sequence in a yeast host strain lacking the corresponding native gene. If the mutagenized gene complements the MMR deficiency of the host strain, individual yeast colonies will appear white. If the mutagenized gene does not complement the MMR deficiency, i.e., a mutant, the yeast colonies will appear white with red sectors. Thus, colonies with a mutant MMR gene can be rapidly identified by visual inspection. These colonies are then used as the starting material to retrieve the test sequence and identify the genetic alteration causing loss-of-MMR function. These sequences are then used to diagnose an individual as having an increased risk to develop cancer.

[0038] The invention reports the function of MLH1 proteins having all possible amino acid substitutions at residues 43 and 44. These variant proteins were tested in quantitative in vivo MMR assays which allowed the classification of each as having either a mutation, a silent polymorphism, or an efficiency polymorphism. Use of sequences and functional information thus obtained represents an additional approach for the diagnosis of an individual as having an increased risk to develop cancer.

[0039] In this invention, the test genetic sequence can be a yeast orthologue variant of the human gene sequence or a human-yeast hybrid sequence of said variant. Illustratively, the human gene involved in DNA mismatch repair can be selected from the group consisting of the hMSH2 (SEQ ID NO: 205), hMSH3 (SEQ ID NO: 41), hMSH4 (SEQ ID NO: 42), hMSH6 (SEQ ID NO: 43), hMLH1 (SEQ ID NO: 31), hMLH3 (SEQ ID NO: 44), hPMS1 (SEQ ID NO: 45) and hPMS2 (SEQ ID NO: 46) genes, and especially, the hMLH1 and hMSH2 genes.

[0040] It is anticipated that the methods described in this text will be incorporated into genetic testing for cancer diagnosis and predisposition in a variety of ways. These uses fall into two general types which are best illustrated by way of examples, as follows: First, the methods are used to produce a database of functional information which is used as a reference source. Following the sequencing of an individual's MMR gene(s) and finding of a variant of uncertain significance (e.g. single amino acid substitution, small in-frame deletion or insertion), the function of that variant will be interpreted by comparison to the information in the database. If the observed variant appears in the database as one which confers a complete or partial loss-of-MMR function the alteration is considered pathogenic and a cause of increased susceptibility to cancer. If the observed variant is classified as a functionally silent polymorphism the alteration is considered non-pathogenic. In an index patient (i.e. a patient with an existing cancer) this information would be of value for disease prognosis and predicting the response to certain therapies, which would play a vital role in management of that patient. The ability to classify variants of uncertain significance would provide the information needed to identify family members of the index patient who would benefit from preventative cancer screening. For individuals who carry a pathogenic variant but with no detectable cancer, a likely recommendation might be to increase the frequency of cancer surveillance in them and, perhaps, to begin cancer prevention strategies. On the other hand, individuals who do not carry a pathogenic variant might be able to follow a more routine plan of cancer avoidance.

[0041] Another use of the methods described in this text would be the development of a standardized genetic test whereby an individual would be screened for all, or a subset of, the variants for which function in MMR is known. This could be accomplished by development of a genotyping assay based on either commercially-available or new technologies. These technologies may include, but are not limited to, those based on DNA:DNA hybridization, DNA:RNA hybridization, “genechip” analysis, PCR, DNA sequencing, primer extension, etc. They might also include screens based on the differential screening of an individual's MMR proteins. These technologies may include, but are not limited to, those that would be based on variant-specific antibodies (e.g. Western blots, radioimmunoassays, immunohistochemistry) or direct protein sequencing. In general, the basis of these technologies is to test for the presence of pre-determined sequence variations in a biological sample using a universally-formatted assay. The assay would determine whether the individual's genotype or protein profile matched a result that would indicate they are a carrier of a MMR gene mutation and thus have a high risk to develop cancer. For example, the assay would reveal the presence of any missense mutations that were classified (using the methods described in this patent application) as a pathogenic mutation. Depending on the results of this test, an individual would be prescribed specific treatments or regimes for cancer surveillance appropriate for the individual's MMR status. Finally, in considering the utility of this invention, it is important to note that the aforementioned applications would not be possible without the methods described herein to ascertain a function for variants of uncertain significance.

### DESCRIPTION OF SPECIFIC EMBODIMENTS

[0042] The invention is further illustrated by way of the following examples, which are not intended to be limiting.

### Example 1

### Functional Analysis of MLH1 Variants

[0043] Rationale. Sequencing of the human MLH1 gene (SEQ ID NO: 31) from many individuals has revealed over 100 different nucleotide variations (i.e. missense codons) that are predicted to give rise to a protein with single amino acid substitutions compared to the wild-type human MLH1 protein (SEQ ID NO: 32). In the absence of additional information these alleles are often termed “variants of uncertain significance” because the functional consequence of the substitutions is unclear. Gaining an understanding of the consequence of these substitutions is critical in light of the known relationship between MMR activity and predisposition to develop certain types of cancer. Taking advantage of the high level of amino acid conservation between the human and yeast S. cerevisiae MMR proteins, a standardized in vivo assay of MMR function in yeast to quantitatively assess the functional significance of missense codons in MMR genes was developed previously (25-27). Using that yeast-based assay, in the present example 21 known human MLH1 variants were analyzed for their effect on MMR activity. These variants, which can be viewed as having been of uncertain significance prior to now, have been previously reported in the literature (28-32) or public databases maintained on the internet by the ICG-HNPCC (http://www.nfdhtl.nl), Human Gene Mutation Database (http://www.hgmd.org) or GeneSnP Database (http://www.genome.utah.edu/genesnps/). Assay materials and procedures are described in detail below, together with the results.

[0044] Plasmids. Plasmid pMETc (p413MET25, (33)) contains a HIS3 selectable marker, a centromere sequence (CEN6) for mitotic stability, an ARS4 origin of DNA replication, the ampicillin-resistance gene for positive selection in E. coli, and a multicloning site between the MET25 promoter and CYC1 terminator. Plasmid pMLH1, a derivative of pMETc lacking the MET25 promoter, contains a 3.8-kb genomic DNA fragment from S. cerevisiae strain S288C including the MLH1 gene coding sequence and 1.5-kb of 5′ flanking sequence (26). Plasmid pSH91 contains a TRP1 selectable marker, a centromere sequence (CEN11), an ARS1 origin of replication, the ampicillin resistance gene, and the URA3 coding sequence preceded by an in-frame (GT)₁₆G tract (34).

[0045] Mutations (n=21) were introduced into the yeast MLH1 gene (SEQ ID NO: 29) using the QuikChange Site-Directed Mutagenesis kit (Stratagene, La Jolla, Calif.) following the manufacturer's instructions. Plasmid pMLH1 was used as template for the following variants (yeast alterations given): G19A (SEQ ID NO: 578), E20D (SEQ ID NO: 129), G64W (SEQ ID NO: 130), C74Y (SEQ ID NO: 131), F77V (SEQ ID NO: 196), R97P (SEQ ID NO: 132), E99D (SEQ ID NO: 133), P138R (SEQ ID NO: 579), R179G (SEQ ID NO: 134), S190P (SEQ ID NO: 135), L272V (SEQ ID NO: 136), K286Q (SEQ ID NO: 580), D304V (SEQ ID NO: 581), A444T (SEQ ID NO: 137), Q552P (SEQ ID NO: 138), R559P (SEQ ID NO: 139), P653S (SEQ ID NO: 582), P661L (SEQ ID NO: 197), R672Q (SEQ ID NO: 140), E676G (SEQ ID NO: 141), and R768S (SEQ ID NO: 142). Sense and antisense oligonucleotide primers were obtained from a commercial source (BioSynthesis Inc. Lewisville, Tex.) and, to facilitate screening for mutant clones, included a silent restriction site change in addition to the desired missense alteration (Table 2 and 6a). For all mutations at least three independent clones were tested for function in yeast with identical results. At least one clone that contained the appropriate restriction site alteration was sequenced on both the coding and non-coding DNA strands to confirm the sequence and verify the native sequence over at least 100 bp on either side of the introduced mutation. The data presented below are derived from four replicate cultures of a single mutant clone that had been confirmed by DNA sequence analysis.

[0046] Yeast strains and media. The strains used in this invention were derived from S. cerevisiae YPH500 (MATα ade2-101 his3-Δ200 leu2-Δ1 lys2-801 trp1-Δ63 ura3-52) (35). Strain YBT24 contains a deletion of the entire MLH1 coding sequence and has the genotype MATα ade2-101 his3-Δ200 leu2-Δ1 lys2-801 trp1-Δ63 ura3-52 mlh1Δ::LEU2 (26). Yeast strains were maintained in SD medium (0.67% yeast nitrogen base without amino acids, 2% dextrose) containing the appropriate growth supplements. Yeast strains were transformed with plasmid DNAs using the polyethylene glycol-lithium acetate method (36).

[0047] Quantitative in vivo MMR assay. Standardized M assays based on mutation to ura3 FOA^{R} were performed as described previously (25, 26). Briefly, YBT24 transformants containing an MLH1 expression vector and pSH91 were cultured overnight in medium lacking uracil and subcultured in liquid media containing adenine, lysine, and uracil, which allows growth of ura3 FOA^{r} mutants [which arise as a result of slippage in the (GT)₁₆G-tract]. After 24 hours in culture, OD₅₉₅ measurements were taken and an aliquot was plated on SD plates containing adenine, lysine, uracil and FOA (1 mg/ml). Mutation frequencies were calculated as described previously (26), except that the concentration (CFU/ml) of total cells was determined from OD₅₉₅ readings using the determined value 1 OD₅₉₅=1.1×10⁷ CFU/ml. The mutation defect is defined as the ratio of the mutation frequency in the test strain divided by that observed in the appropriate MMR-proficient control strain.

[0048] Statistical Comparisons. Mean mutation frequencies (n=4) from independent experiments were compared to control values within each particular experiment using T-tests (Excel 97, Microsoft). The Bonferroni adjustment was used to set the significance level at P≦0.025 to reject the null hypothesis (37, 38). Standard deviations and 95% confidence intervals (CI) were calculated using Excel.

[0049] Results. Site-directed mutations were made in plasmid pMLH1 to generate missense codons in the yeast MLH1 gene (SEQ ID NO: 29). These missense codons alter the yeast MLH1 coding sequence (SEQ ID NO: 30) to encode a protein with amino acid substitutions identical to those previously observed in the human population (Table 2 and 6a). The variant MLH1 genes and control plasmids pMLH1 and pMETc were introduced into YBT24 containing pSH91 and tested for activity in the standardized MMR assay. Representative yeast strains were assayed in 6 independent experiments and the results are listed in Table 3. Strain YBT24 containing pMLH1 exhibited a mean mutation frequency of 1.4×10⁻⁵. The same strain containing the pMETc expression vector, which lacks an MLH1 gene, exhibited a mean mutation frequency of 265×10⁻⁵. These results indicate that, depending on the experiment, YBT24 deficient in MLH1 exhibits a mutation defect ranging from 136 to 241. Yeast strains expressing MLH1p with the amino acid substitutions G64W (SEQ ID NO: 130), S190P (SEQ ID NO: 135), D304V (SEQ ID NO: 581), and R768S (SEQ ID NO: 142) exhibited mean mutation frequencies of 171-445×10⁻⁵ (Table 3). These mutation frequencies represent mutation defects of 122-318. Statistical analyses of the mutation frequencies determined in each experiment showed that clones containing MLH1 G64W, S190P, D304V, and R768S were statistically greater than the strain expressing wild-type yeast MLH1p. Moreover, the mutation frequencies were greater than or not significantly different from that exhibited by YBT24 containing pMETc. These results demonstrate that amino acid substitutions G64W, S190P, D304V, and R768S result in complete loss-of-MMR function. Therefore, these four alterations (G64W, S190P, D304V, and R768S) are considered inactivating mutations.

[0050] Strain YBT24 expressing the G19A (SEQ ID NO: 578), P138R (SEQ ID NO: 579), L272V (SEQ ID NO: 136), K286Q (SEQ ID NO: 580), A444T (SEQ ID NO: 137), P661L (SEQ ID NO: 197), and R672Q (SEQ ID NO: 140) variants exhibited mean mutation frequencies of 0.7-1.8×10⁻⁵ (Table 3), levels which were not significantly different from the mutation frequency exhibited by YBT24 expressing the wild-type yeast MLH1 gene. These results demonstrate that the G19A, P138R, L272V, K286Q, A444T, P661L, and R672Q amino acid substitutions do not detectably alter MLH1p function in MMR. Therefore these seven alterations (G19A, P138R, L272V, K286Q, A444T, P661L and R672Q) are considered silent polymorphisms.

[0051] Ten of the codon alterations in MLH1 gave rise to proteins which exhibited intermediate levels of MMR activity. The E20D (SEQ ID NO: 129), C74Y (SEQ ID NO: 131), F77V (SEQ ID NO: 196), R97P (SEQ ID NO: 132), E99D (SEQ ID NO: 133), R179G (SEQ ID NO: 134), Q552P (SEQ ID NO: 138), L559P (SEQ ID NO: 139), P653S (SEQ ID NO: 582), and E676G (SEQ ID NO: 141) variants exhibited mean mutation frequencies of 1.9 to 95×10⁻⁵ (Table 3). Statistical analysis of the independent experiments showed that the mutation frequencies were significantly different from that exhibited by YBT24 containing either pMLH1 or pMETc. The results indicate that the E20D, C74Y, F77V, R97P, E99D, R179G, Q552P, L559P, P653S, and E676G variants confer mutation defects of 68, 59, 56, 120, 7.7, 1.4, 23, 29, 11 and 5.1, respectively. These alterations are considered efficiency polymorphisms (ΔE) because they confer a reduced, but not complete, loss-of-MMR function (i.e. partial function in MMR). The corresponding amino acid alterations in the human MLH1 protein (see Tables 2 and 6a) are considered to have an equivalent effect on MMR activity.

### Example 2

### Construction and Functional Analysis of Hybrid Human-Yeast MLH1 Genes

[0052] Rationale. Approximately 47% of the MLH1 nucleotide alterations observed in the human population are predicted to alter an amino acid residue which is not conserved in the yeast MLH1p. To address this issue a series of hybrid human-yeast genes that contained portions of human MLH1p spanning amino acids 1-177 (of 756 total) were developed and shown to confer moderate levels of MMR activity (27). In this invention, the development of six new human-yeast hybrid genes that contain regions of human MLH1p (spanning amino acids 175-341) replacing the homologous region of yeast MLH1p are reported. Except for the noted chimeric region, the structure of each hybrid gene is identical to the parental expression vector pMLH1 (see Example 1), which contains the native yeast MLH1 gene and 5′ regulatory region.

[0053] Plasmids. Hybrid human-yeast MLH1 genes were constructed using pMLH1 (see Example 1) as the parental vector. MLH1_h(175-267). This hybrid gene was constructed using a three-piece overlap extension polymerase chain reaction (PCR) method. A 179-bp fragment of the human MLH1 coding sequence was amplified by PCR from a commercially-available cDNA clone (ATCC#217884, American Type Culture Collection, Rockville, Md.) using primers SEQ ID NO: 33 and SEQ ID NO: 34. A 465-bp fragment from the 5′ end of yeast MLH1 was amplified from S. cerevisiae strain S288C genomic DNA using primers SEQ ID NO: 35 and SEQ ID NO: 36. A 1535-bp fragment from the 3′ end of yeast MLH1 was amplified from S. cerevisiae strain S288C genomic DNA using primers SEQ ID NO: 37 and SEQ ID NO: 38. All PCR amplifications were carried out using Pfu DNA polymerase (Stratagene, La Jolla, Calif.) using the manufacturer's recommended conditions. The three fragments were mixed in approximately equimolar amounts and subjected to overlap extension PCR using primers SEQ ID NO: 35 and SEQ ID NO: 39. The overlap extension PCR product was digested with AatII and Bsu36I and ligated into AatII-Bsu36I digested yeast MLH1 expression vector pMLH1 (27). The protein encoded by this gene contains amino acids 1-171 and 268-769 of yeast MLH1p and amino acids 175-267 of the human MLH1p (SEQ ID NO: 40). MLH1_h(175-214). An approximately 900-bp fragment of yeast MLH1 was amplified from S. cerevisiae strain S288C genomic DNA using the primers SEQ ID NO: 160 and SEQ ID NO: 161. The fragment was digested with BtgI and Bsu36I and ligated into BtgI-Bsu36I digested pMLH1_h(175-267), replacing the equivalent portion of the human-yeast hybrid sequence. The protein encoded by this gene contains amino acids 1-171 and 212-769 of yeast MLH1p and amino acids 175-214 of the human MLH1p (SEQ ID NO: 198). MLH1_h(208-267). An approximately 560-bp fragment of yeast MLH1 was amplified from S. cerevisiae strain S288C genomic DNA using the primers SEQ ID NO: 35 and SEQ ID NO: 162. The fragment was blunt-end cloned into EcoRV-digested plasmid pBluescript II (KS-) (Stratagene, La Jolla Calif.). The cloned yeast fragment was then excised using an AatII-BtgI double digest and ligated into AatII-BtgI digested pMLH1_h(175-267), replacing the equivalent portion of the human-yeast hybrid sequence. The protein encoded by this gene contains amino acids 1-204 and 268-769 of yeast MLH1p and amino acids 208-267 of the human MLH1p (SEQ ID NO: 199). MLH1_h(265-341). This human-yeast hybrid gene was constructed using a two-piece overlap extension PCR method. A 255-bp fragment of the human MLH1 coding sequence was amplified by PCR from ATCC cDNA clone #217884 (American Type Culture Collection, Rockville, Md.) using primers SEQ ID NO: 163 and SEQ ID NO: 164. A 495-bp fragment from the central portion of yeast MLH1 was amplified from S. cerevisiae strain S288C genomic DNA using primers SEQ ID NO: 165 and SEQ ID NO: 161. PCR amplifications were carried out using Pfu DNA polymerase (Stratagene, La Jolla Calif.) using the manufacturer's recommended conditions. The two fragments were mixed in approximately equimolar amounts and subjected to overlap extension PCR using primers SEQ ID NO: 163 and SEQ ID NO: 161. The overlap extension PCR product was digested with SpeI and ligated into SpeI digested expression vector pMLH1 (27), replacing the equivalent portion of the yeast gene. The correct orientation of the insert was verified by restriction fragment length polymorphism (RFLP) analysis using an introduced SalI site in the primer SEQ ID NO: 163. The protein encoded by this gene contains amino acids 1-264 and 342-769 of yeast MLH1p and amino acids 265-341 of the human MLH1p (SEQ ID NO: 200). MLH1_h(265-311). An approximately 620-bp fragment of yeast MLH1 was amplified from S. cerevisiae strain S288C genomic DNA using the primers SEQ ID NO: 166 and SEQ ID NO: 161. The fragment was digested with AccB7I and Bsu36I and ligated into AccB7I-Bsu36I digested pMLH1_h(265-341), replacing the equivalent portion of the human-yeast hybrid sequence. The protein encoded by this gene contains amino acids 1-264 and 312-769 of yeast MLH1p and amino acids 265-311 of the human MLH1p (SEQ ID NO: 201). MLH1_h(298-341). An approximately 840-bp fragment of yeast MLH1 was amplified from S. cerevisiae strain S288C genomic DNA using the primers SEQ ID NO: 35 and SEQ ID NO: 167. The fragment was digested with ClaI and AccB7I and ligated into ClaI-AccB7I digested pMLH1_h(265-341), replacing the equivalent portion of the human-yeast hybrid sequence. The protein encoded by this gene contains amino acids 1-297 and 342-769 of yeast MLH1p and amino acids 298-341 of the human MLH1p (SEQ ID NO: 202). All hybrid MLH1 genes were verified by DNA sequencing.

[0054] Results. Six hybrid human-yeast MLH1 genes were constructed by replacing a region of the yeast MLH1 coding sequence with the homologous region of the human MLH1 (FIG. 1). Plasmids carrying the human-yeast hybrid MLH1 genes were introduced into yeast strain YBT24 containing pSH91 and standardized MMR assays were carried out as described previously (see Example 1). Representative strains were assayed in independent experiments and the results are shown in Table 4. Strain YBT24 containing pMETc, which lacks an MLH1 gene, exhibited mutation frequencies of 174-303×10⁻⁵ while the same strain containing pMLH1 exhibited mutation frequencies of 1.2-1.6×10⁻⁵. These results represent mutation defects in the range 144-193 for cells lacking functional MLH1p. The mutation frequencies of YBT24 containing the hybrid MLH1 genes MLH1_h(175-267), MLH1_h(175-214), MLH1_h(208-267), MLH1_h(265-341), MLH1_h(265-311), and MLH1_h(298-341), were 30.8×10⁻⁵, 89.4×10⁻⁵, 5.7×10⁻⁵, 48.3×10⁻⁵, 35.7×10⁻⁵, and 38.4×10⁻⁵, respectively. These levels represent mutation defects ranging from 3.7 to 56.9 (Table 4). Although the hybrid genes did not appear to fully complement the MMR defect of YBT24, the results show that each hybrid was partially functional in MMR. The availability of these human yeast hybrid genes increase the number of human codon alterations which can be functionally evaluated in yeast.

### Example 3

### Functional Analysis of MLH1p Variants Using Human-Yeast Hybrid Genes

[0055] Plasmids. Hybrid human-yeast MLH1 expression vectors pMLH1_h(1-86), pMLH1_h(41-86), pMLH1_h(77-134), and pMLH1_h(77-177) have been described previously (26, 27). The indicated alterations were made in the humanized region of these plasmids using the QuikChange Mutagenesis kit (Stratagene) and the oligonucleotides shown in Table 2. Hybrids MLH1_(41-86) containing the G67E alteration and MLH1_h(77-134) containing the N35S (equivalent to human MLH1 N38S) and C77R alterations were identified in the prospective genetic screen (Example 8). At least one clone that contained the appropriate restriction site alteration was sequenced on both the coding and non-coding DNA strands to confirm the sequence and verify the native sequence over at least 100 bp on either side of the introduced mutation. The data presented below are derived from four replicate cultures of a single mutant clone that had been confirmed by DNA sequence analysis.

[0056] Results. Hybrid human-yeast MLH1 genes containing the indicated alteration were transformed into YBT24 containing pSH91 and assayed for MMR activity as described in Example 1. Mutation frequencies were compared to YBT24 harboring the parental hybrid MLH1 gene, and pMETc, which lacks an MLH1 gene. Mean mutation frequencies (n=4) were compared to that exhibited by control strains using T-tests with significance levels of P≦0.025 (Example 1). As shown in Table 5 (“Experiment #1”), the mutation frequencies conferred by A29S and 132V substitutions in hybrid MLH1_h(1-86), were 33.0×10⁻⁵ and 32.6×10⁻⁵, respectively. These levels were not significantly different from the mutation frequency conferred by the parental hybrid MLH1_h(1-86) (23.3×10⁻⁵). The mutation frequency conferred by the G67E substitution in hybrid MLH1_h(41-86) was 153×10⁻⁵ (Table 5, “Experiment #2”). This level was significantly greater than that conferred by the parental hybrid MLH1_h(41-86) (27.8×10⁻⁵) and significantly less than that conferred by pMETc (234×10⁻⁵). The mutation frequencies conferred by N35S and C77R substitutions in hybrid MLH1_h(77-134), were 214×10⁻⁵ and 290×10⁻⁵, respectively (Table 5, “Experiment #3”). These levels were significantly greater than the mutation frequency conferred by the parental hybrid MLH1_h(77-134) (11.5×10⁻⁵). Moreover, the mutation frequencies conferred by N35S and C77R were greater than or not statistically different from that conferred by pMETc (182×10⁻⁵), indicating that they confer a complete loss-of-MMR function. The mutation frequencies conferred by A128P and A160V substitutions in hybrid MLH1_h(77-177), were 228×10⁻⁵ and 5.9×10⁻⁵, respectively (Table 5, “Experiment #4”). For the A128P substitution the mutation frequency was significantly greater than the mutation frequency conferred by the parental hybrid MLH1_h(77-177) (6.6×10⁻⁵) and significantly less than that conferred by pMETc. For the A160V substitution the mutation frequency was not statistically different from that conferred by the parental hybrid MLH1_h(77-177).

[0057] In summary, the results indicate that the N35S and C77R substations confer a complete loss-of-MMR function. Thus, these two alterations (N35S and C77R) are inactivating mutations. The A29S, I32V and A160V substitutions do not effect MMR function and are considered silent polymorphisms. The G67E and A128P substitutions confer intermediate levels of MMR activity and are considered efficiency polymorphisms.

### Example 4

### Functional Analysis of MSH2p Variants

[0058] Rationale. Sequencing of the human MSH2 gene (SEQ ID NO: 205) from many individuals has revealed over 100 different nucleotide variations (i.e. missense codons) that are predicted to give rise to a protein with single amino acid substitutions compared to the wild-type human MLH1 protein (SEQ ID NO: 206). These variants, which can be viewed as having been of uncertain significance prior to now, have been previously reported in the literature (29, 39-47) or public databases maintained on the internet by the ICG-HNPCC (http://www.nfdhtl.nl), Human Gene Mutation Database (http://www.hgmnd.org), the Swiss Protein Database (http://us.expasy.org) and the single nucleotide polymorphism (SNP) databases (http://dir-apps.niehs.nih.gov/egsnp/). Taking advantage of the high level of amino acid conservation between the human and yeast S. cerevisiae MMR proteins, a standardized in vivo assay of MMR function in yeast to quantitatively assess the functional significance of missense codons in MMR genes was developed previously (25-27). Using that yeast-based assay, in the present example 41 known human MSH2 variants were analyzed for their effect on MMR activity. Assay materials and procedures are described in detail below, together with the results.

[0059] Plasmids. Plasmids pMETc, the parental expression vector lacking a cDNA insert, and pSH91, which contains the URA3 coding sequence preceded by an in-frame (GT)₁₆G tract, were described in Example 1. Plasmid pMETc/MSH2 contains the 2.9-kb MSH2 coding sequence from S. cerevisiae strain S288C cloned between the MET25 promoter and CYC1 terminator of pMETc (25, 26).

[0060] Mutations (n=41) were introduced into the yeast MSH2 gene (SEQ ID NO: 203) using the QuikChange Site-Directed Mutagenesis kit (Stratagene, La Jolla, Calif.) following the manufacturer's instructions. Plasmid pMETc/MSH2 was used as template for the following variants (yeast alterations given): P30L (SEQ ID NO: 583), T44M (SEQ ID NO: 532), Q61P (SEQ ID NO: 207), VE106/107-del (SEQ ID NO: 584), N123S (SEQ ID NO: 208), D163H (SEQ ID NO: 209), N182S (SEQ ID NO: 75), E194G (SEQ ID NO: 210), C195R (SEQ ID NO: 211), C195W (SEQ ID NO: 585), A267V (SEQ ID NO: 212), G317V (SEQ ID NO: 586), S318C (SEQ ID NO: 533), C345R (SEQ ID NO: 76), C345Y (SEQ ID NO: 77), G350R (SEQ ID NO: 587), P361L (SEQ ID NO: 588), L402F (SEQ ID NO: 213), L402V (SEQ ID NO: 214), P456-del (SEQ ID NO: 589), L457P (SEQ ID NO: 590), L521P (SEQ ID NO: 215), R552C (SEQ ID NO: 591), E580V (SEQ ID NO: 592), N601S (SEQ ID NO: 593), L613R (SEQ ID NO: 594), D621N (SEQ ID NO: 595), A627V (SEQ ID NO: 78), P640T (SEQ ID NO: 596), H658R (SEQ ID NO: 79), G702R (SEQ ID NO: 216), G702V (SEQ ID NO: 217), M707I (SEQ ID NO: 218), I710T (SEQ ID NO: 80), G711R (SEQ ID NO: 81), C716R (SEQ ID NO: 82), V741I (SEQ ID NO: 597), I754V (SEQ ID NO: 219), G770R (SEQ ID NO: 83), I789V (SEQ ID NO: 84), and K873E (SEQ ID NO: 220). Sense and antisense oligonucleotide primers were obtained from a commercial source (BioSynthesis Inc. Lewisville, Tex.) and, to facilitate screening for mutant clones, included a silent restriction site change in addition to the desired missense alteration (Tables 6 and 6a). For all mutations at least three independent clones were tested for function in yeast with identical results. At least one clone that contained the appropriate restriction site alteration was sequenced on both the coding and non-coding DNA strands to confirm the sequence and verify the native sequence over at least 100 bp on either side of the introduced mutation. The data presented below are derived from four replicate cultures of a single mutant clone that had been confirmed by DNA sequence analysis.

[0061] Yeast strains and media. The strains used in this invention were derived from S. cerevisiae YPH500 (MATα ade2-101 his3-Δ200 leu2-Δ1 lys2-801 trp1-Δ63 ura3-52) (35). Strain YBT25 contains a deletion of the entire MSH2 coding sequence and has the genotype MATα ade2-101 his3-Δ200 leu2-Δ1 lys2-801 trp1-Δ63 ura3-52 msh2Δ::LEU2 (26). Strains were maintained in SD medium (0.67% yeast nitrogen base without amino acids, 2% dextrose) containing the appropriate growth supplements. Strains were transformed with plasmid DNAs using the polyethylene glycol-lithium acetate method (36).

[0062] Quantitative in vivo MMR assays. The standardized in vivo MMR assay based on instability of the (GT)₁₆G::URA3 allele in pSH91 was described in Example 1. Mean mutation frequencies from 4 replicate cultures are reported. Statistical comparisons were carried out as described in Example 1 with conclusions based on results within each independent experiment. Forward mutation rates to canavanine resistance were determined by fluctuation analysis using the method of the median (48). Individual colonies (YBT25 transformed with the MSH2 expression vectors) were expanded in liquid SD media containing the appropriate supplements. After 24 hours in culture, OD₅₉₅ measurements were taken and an aliquot was plated on SD plates containing the appropriate supplements and 60 μg/ml canavanine. Canavanine-resistant colonies were counted after 2-3 days growth at 30° C. Mutation frequencies were determined by dividing the concentration (CFU/ml) of canavanine resistant colonies by the concentration (CFU/ml) of total cells. Median mutation frequencies and 95% confidence intervals (CI) were calculated using Microsoft Excel 97. The mutation defect is defined as the ratio of the mutation frequency in the test strain divided by that observed in the appropriate MMR-proficient control strain.

[0063] Results. Site-directed mutations were made in plasmid pMETc/MSH2 to generate missense codons in the yeast MSH2 gene (SEQ ID NO: 203). These missense codons alter the yeast MSH2 coding sequence (SEQ ID NO: 204) to encode a protein with amino acid substitutions identical to those previously observed in the human population (Table 6 and 6a). The variant MSH2 genes and control plasmids pMETc/MSH2 and pMETc were transformed into YBT25 containing pSH91 and tested for activity in both the standardized MMR assay based on GT-tract stability (Example 1) and a fluctuation test for canavanine resistance, which detects predominantly base substations and frameshift mutations in mononucleotide tracts in the arginine permease (CAN1) gene (49). Representative yeast strains were assayed in independent experiments and the results are summarized in Table 7.

[0064] As measured using the (GT)₁₆G::URA3 allele, strain YBT25 containing the pMETc expression vector, which lacks an MSH2 gene, exhibited a mean mutation frequency of 350×10⁻⁵ (Table 7, “None”). The same strain containing the pMETc/MSH2 expression vector exhibited a mean mutation frequency of 4.0×10⁻⁵ (Table 7, “MSH2”). These results show that expression of wild-type yeast MSH2 from pMETc/MSH2 complements the MSH2-deficiency of YBT25 and indicates that YBT25 lacking MSH2p has a mutation defect of 88. Yeast strain YBT25 expressing MSH2p with the amino acid substitutions C195R (SEQ ID NO: 211), G350R (SEQ ID NO: 587), H658R (SEQ ID NO: 79), G702R (SEQ ID NO: 216), C716R (SEQ ID NO: 82), and G770R (SEQ ID NO: 83) exhibited mutation frequencies of 280 to 410×10⁻⁵ (Table 7). These mutation frequencies correspond to mutation defects of 70 to 103. Statistical analyses of the data from each independent experiment (not shown) indicated that the mutation frequencies conferred by the C195R, G350R, H658R, G702R, C716R, and G770R substitutions were statistically greater than the level exhibited by strain YBT25 expressing wild-type yeast MSH2p and were not significantly different from strain YBT25 containing pMETc. Therefore, these results demonstrate that amino acid substitutions C195R, G350, H658R, G702R, C716R, and G770R in MSH2p result in complete loss-of-MMR function.

[0065] Strain YBT25 expressing MSH2p with amino acid substitutions P30L (SEQ ID NO. 583), T44M (SEQ ID NO: 532), Q61P (SEQ ID NO: 207), N123S (SEQ ID NO: 208), D163H (SEQ ID NO: 209), N182S (SEQ ID NO: 75), C195W (SEQ ID NO. 585), G317V (SEQ ID NO: 586), S318C (SEQ ID NO: 533), C345Y (SEQ ID NO: 77), P361L (SEQ ID NO. 588), L402F (SEQ ID NO: 213), L402V (SEQ ID NO: 214), L521P (SEQ ID NO: 215), E580V (SEQ ID NO. 592), N601S (SEQ ID NO. 593), A627V (SEQ ID NO: 78), G702V (SEQ ID NO: 217), M707I (SEQ ID NO: 218), I710T (SEQ ID NO: 80), V741I (SEQ ID NO. 597), I754V (SEQ ID NO: 219), I789V (SEQ ID NO: 84), and K873E (SEQ ID NO: 220) exhibited mutation frequencies of 0.6 to 8.0×10⁻⁵ as measured using the (GT)₁₆G::URA3 allele (Table 7). Statistical analyses of the data from each independent experiment (not shown) indicated that these mutation frequencies were not significantly different from the mutation frequency exhibited by YBT25 expressing wild-type yeast MSH2p. Therefore, these results demonstrate that the P30L, T44M, Q61P, N123S, D163H, N182S, C195W, G317V, S318C, C345Y, P361L, L402F, L402V, L521P, E580V, N601S, A627V, G702V, M707I, I710T, V741I, I754V, I789V and K873E amino acid substitutions do not detectably alter M function as measured by GT-tract instability.

[0066] Ten of the codon alterations in MSH2 gave rise to proteins which exhibited intermediate levels of MMR activity. Strain YBT25 expressing MSH2p with amino acid substitutions VE106/107-del (SEQ ID NO. 584), E194G (SEQ ID NO: 210), A267V (SEQ ID NO: 212), C345R (SEQ ID NO: 76), P456-del (SEQ ID NO. 589), L457P (SEQ ID NO: 590), R552C (SEQ ID NO. 591), L613R (SEQ ID NO. 594), D621N (SEQ ID NO. 595), P640T (SEQ ID NO. 596), and G711R (SEQ ID NO: 81) exhibited mutation frequencies of 4.7 to 280×10⁻⁵ as measured using the (GT)₁₆G::URA3 allele (Table 7). Statistical analyses of the data from each independent experiment (not shown) indicated that the mutation frequencies were significantly different from that exhibited by YBT25 containing either pMETc/MSH2 or pMETc. Therefore, the results indicate that the VE106/107-del, E194G, A267V, C345R, P456-del, L457P, R552c, L613R, D621N, P640T, and G711R amino acid substitutions confer a reduced, but not complete, loss-of-MMR function i.e. partial function in MMR.

[0067] To confirm the functional results obtained using the (GT)₁₆G::URA3 allele a second MMR assay based on forward mutation to canavanine resistance was carried out. This assay detects mainly base substitutions and frameshift mutations in mononucleotide tracts in the arginine permease (CAN1) gene (49). The results show that for the majority of alterations (n=34 of 41) the functional results obtained using the CAN1 allele were similar to those obtained using (GT)₁₆G::URA3 (Table 7). Interestingly, the L521P substitution, which gave no increase in the mutation frequency as measured by the (GT)₁₆G::URA3 allele, conferred a considerable increase in the mutation frequency as measured by the canavanine resistance assay. It is possible that the L521P substitution causes aberrant recognition and/or processing of mutations in mononucleotide tracts, which occur in the CAN1 gene, while allowing normal processing of mutations in dinucleotide repeats, which occur in the (GT)₁₆G::URA3 allele. A structural basis for this assertion exists because amino acid residue 521 lies immediately adjacent to a region of the protein known to be important for recognition of mismatched DNA (50-52). Additional experiments are needed to explore DNA mismatch recognition and/or processing by MSH2p containing the L521P alteration. The E194G, A267V, C345R P456-del, L613R, D621N, and P640T alterations, which conferred partial loss of MMR activity using the (GT)₁₆G::URA3 allele, did not confer notable increases in the mutation frequency using canavanine resistance as an end point. These alterations may have minimal effects on the repair of common canavanine resistance mutations. Alternatively, it is possible that the sensitivity of the canavanine resistance assay was too low to detect the rather slight defects in MMR function conferred by these amino acid alterations.

[0068] In summary, codon alterations which lead to the amino acid substitutions C195R, G350R, H658R, G702R, C716R, and G770R are considered inactivating mutations. Alterations leading to amino acid substitutions P30L, T44M, Q61P, N123S, D163H, N182S, C195W, G317V, S318C, C345Y, P361L, L402F, L402V, E580V, N601S, A627V, G702V, M707I, I710T, V741I, I754V, I789V and K873E are classified as silent polymorphisms. Alterations VE106/107-del, E194G, A267V, C345R, P456-del, L457P, R552c, L613R, D621N, P640T, and G711R are classified as efficiency polymorphisms because they confer intermediate levels of MMR activity using the most sensitive reporter gene [(GT)₁₆G::URA3]. The substitution L521P is also classified as an efficiency polymorphism because it appears to partially impair MMR activity, albeit in an DNA mismatch-specific manner. The corresponding amino acid alterations in the human MSH2 protein (see Tables 6 and 6a) are considered to have an equivalent effect on R activity.

### Example 5

### Construction and Functional Analysis of Hybrid Human-Yeast MSH2 Genes

[0069] Rationale. Approximately 44% of the MSH2 nucleotide alterations observed in the human population are predicted to alter an amino acid residue which is not conserved in the yeast MSH2p. To address this issue, the construction and functional characterization of hybrid human-yeast hybrid genes that contain regions of human MSH2p replacing the homologous region of yeast MSH2p are reported herein. Except for the noted chimeric region, the structure of each hybrid genes is identical to the parental expression vector pMETc/MSH2, which contains the native yeast MSH2 gene expressed from the MET25 promoter (see Example 4).

[0070] Plasmids. Hybrid human-yeast MSH2 genes encoding chimeric MSH2 proteins were constructed using pMETc/MSH2 as the parental vector (see Example 4). MSH2_h(1-63). This hybrid human-yeast gene was constructed using a two-piece overlap extension PCR method. A 230-bp 5′-end fragment of human MSH2 was amplified by PCR from ATCC cDNA clone #7520190 (American Type Culture Collection, Rockville, Md.) using primers SEQ ID NO: 221 and SEQ ID NO: 222. A 1.8-kb fragment from the central portion of yeast MSH2 was amplified from plasmid pMETc/MSH2 using primers SEQ ID NO: 223 and SEQ ID NO: 224. PCR amplifications were carried out using Pfu Turbo DNA polymerase (Stratagene, La Jolla Calif.) using the manufacturer's recommended conditions. The two fragments were mixed in approximately equimolar amounts and subjected to overlap extension PCR using primers SEQ ID NO: 221 and SEQ ID NO: 224. The overlap extension PCR product was digested with BamHI and NcoI and ligated into BamHI-NcoI digested pMETc/MSH2, replacing the equivalent portion of the yeast gene. The plasmid containing MSH2_h(1-63) was verified by restriction fragment length polymorphism (RFLP) analysis. The protein (SEQ ID NO: 103) encoded by this gene contains amino acids 1-63 of human MSH2p and 64-964 of yeast MSH2p. MSH2_h(621-832). Methods for the construction of this gene have been described in an earlier patent application (WO 02/081624 A3, published Oct. 17, 2002). The protein (SEQ ID NO: 537) encoded by this gene contains amino acids 1-638 and 861-964 of yeast MSH2p and amino acids 621-832 of human MSH2p. MSH2_h(621-739). An approximately 650-bp 3′-end fragment of yeast MSH2 was amplified from S. cerevisiae strain S288C genomic DNA using the primers SEQ ID NO: 225 and SEQ ID NO: 226. The fragment was digested with Bsu36I and XhoI and ligated into Bsu36I-XhoI digested pMETc/MSH2_h(621-832), replacing the equivalent portion of the hybrid human-yeast sequence. The protein (SEQ ID NO: 104) encoded by this gene contains amino acids 1-638 and 759-964 of yeast MSH2p and amino acids 621-739 of human MSH2p. MSH2_h(730-832). An approximately 1.5-kb fragment of yeast MSH2 was amplified from S. cerevisiae strain S288C genomic DNA using the primers SEQ ID NO: 227 and SEQ ID NO: 228. The fragment was digested with SphI and Bsu36I and ligated into SphI-Bsu36I digested pMETc/MSH2_h(621-832), replacing the equivalent portion of the hybrid human-yeast sequence. The protein (SEQ ID NO: 534) encoded by this gene contains amino acids 1-748 and 861-964 of yeast MSH2p and amino acids 730-832 of human MSH2p. MSH2_h(621-832)ins9. This hybrid human-yeast gene was constructed using a two-piece overlap extension PCR method. A 700-bp 5′-end fragment of yeast MSH2 was amplified by PCR from pMETc/MSH2_h(621-832) using primers SEQ ID NO: 229 and SEQ ID NO: 226. A 450-bp fragment from the central portion of hybrid MSH2_h(621-832) was also amplified from plasmid pMETc/MSH2_h(621-832) using primers SEQ ID NO: 230 and SEQ ID NO: 231. Note that primers SEQ ID NO: 229 and SEQ ID NO: 231 contain at their 5′ ends 24 and 27 bases, which are complimentary to each other and encode yeast MSH2p amino acids 827-835 (“ins9”). PCR amplifications were carried out using Pfu Turbo DNA polymerase (Stratagene, La Jolla Calif.) using the manufacturer's recommended conditions. The two fragments were mixed in approximately equimolar amounts and subjected to overlap extension PCR using primers SEQ ID NO: 230 and SEQ ID NO: 226. The overlap extension PCR product was digested with Bsu36I and XhoI and ligated into Bsu36I-XhoI digested pMETc/MSH2_h(621-832), replacing the equivalent portion of the hybrid yeast gene. The plasmid containing MSH2_h(621-832) was verified by restriction fragment length polymorphism (RFLP) analysis using an Eco47III site added by primer SEQ ID 229. The protein (SEQ ID NO: 535) encoded by this gene is identical to that encoded by MSH2_h(621-832) except for the insertion of yeast residues 827-835, between human residues 807-808. MSH2_h(730-832)ins9. Methods for construction of this hybrid gene were similar to those used for MSH2_h(621-832)ins9, except that plasmid pMETc/MSH2-h(730-832) was used for cloning and amplification of PCR fragments. The protein (SEQ ID NO: 536) encoded by this gene is identical to that encoded by MSH2_h(730-832) except for the insertion of yeast residues 827-835 (“ins9”), between human residues 807-808.

[0071] Site directed mutations. Mutations were introduced into the hybrid human-yeast MSH2_h(621-739) gene using the QuikChange Site-Directed Mutagenesis kit (Stratagene, La Jolla, Calif.) following the manufacturer's instructions. Plasmid pMETc/MSH2_h(621-739) was used as template for the following variants (yeast alterations given): A636P (SEQ ID NO: 85), E647K (SEQ ID NO: 86), Y656H (SEQ ID NO: 87), and M729V (SEQ ID NO: 88). Sense and antisense oligonucleotide primers were obtained from BioSynthesis Inc. (Lewisville, Tex.) and, to facilitate screening for mutant clones, included a silent restriction site change in addition to the desired missense alteration (Table 6).

[0072] Results. Six hybrid human-yeast MSH2 genes were constructed by replacing a region of the yeast MSH2p coding sequence with the homologous region of the human MSH2p (FIG. 2). Plasmids carrying the hybrid human-yeast MSH2 genes were introduced into yeast strain YBT25 containing pSH91 and standardized MMR assays were carried out as described previously (see Example 1). Strain YBT25 containing pMETc, which lacks an MSH2 gene, exhibited mutation frequencies of 328×10⁻⁵ while the same strain containing pMETc/MSH2 exhibited mutation frequencies of 1.6×10⁻⁵ (Table 8, Experiment #1). These results represent mutation defect of 199 for cells lacking functional MSH2p. The mutation frequencies of YBT25 expressing MSH2 proteins MSH2_h(1-63), MSH2_h(621-832), MSH2_h(621-739), and MSH2_h(730-832) were 245×10⁻⁵, 228×10⁻⁵, 3.2×10⁻⁵, and 245×10⁻⁵, respectively (Table 8, Experiment #1). The hybrid MSH2_h(1-63) did not appear to confer notable levels of MMR activity it can be concluded that this region of the human MSH2p can not functionally substitute for the homologous yeast MSH2 region. Similarly, hybrid MSH2_h(621-832), which contains a 212 amino acid portion of the human MSH2p ATPase domain, also was non-functional in MMR. However, when this portion of the ATPase domain was split into two smaller portions, one of the subsequent hybrids [MSH2_h(621-739)] conferred notable levels of MMR activity while the other [MSH2_h(730-832)] was non-functional. The active human yeast hybrid protein MSH2_h(621-739) contains a 119-amino acid portion of human MSH2p and exhibited a mutation defect of 2 compared to wild-type yeast MSH2p.

[0073] To achieve MMR activity in non-functional hybrids, hybrids MSH2_h(621-832) and MSH2_h(730-832) were modified to encode yeast amino acids 827-KNLKEQKHD-835 (“ins9”) between human residues 807-808 of these hybrids (FIG. 2). This 9-amino acid portion of yeast MSH2p is absent from the equivalent portion of the human region and thus may be an important feature for function of the protein in yeast. Consistent with this postulate, hybrids MSH2_h(621-832)ins9 and MSH2_h(730-832)ins9 exhibited substantial function in MMR compared to the parental hybrids which did not contain the “ins9” peptide (Table 8, Experiment #2). Amino acids 827-835 appear to be critical for function of MSH2p in yeast and may play a role in binding and/or hydrolysis of ATP. Alternatively, these residues may provide a surface necessary for important protein:protein interactions in yeast. The availability of functional hybrid human yeast MSH2 genes increases the number of human codon alterations which can be functionally evaluated in yeast. The aforementioned experiments show that all human variants within codons 621-832 (≈23% of the full length protein) can now be functionally tested in yeast.

[0074] To demonstrate the utility of the human-yeast hybrid MSH2 proteins four human missense codons, which occur at amino acid residues that are not conserved in the yeast protein, were tested for their effects on MMR activity. Site-directed mutations were made in plasmid pMETc/MSH2_h(621-739) to generate missense codons identical to those previously observed in the human population (Table 6). The variant MSH2 genes and control plasmids pMETc/MSH2_h(621-739) and pMETc were transformed into YBT25 containing pSH91 and tested for activity in the standardized MMR assay (Example 1). As measured using the (GT)₁₆G::URA3 allele, strain YBT25 containing the pMETc expression vector, which lacks an MSH2 gene, exhibited a mean mutation frequency of 258×10⁻⁵ (Table 8, Experiment #3). The same strain expressing MSH2-h(621-739) exhibited a mean mutation frequency of 8.5×10⁻⁵ (Table 8, Experiment #3). The A636P, E647K, Y656H, and M729V variants conferred mutation frequencies of 239×10⁻⁵, 8.9×10⁻⁵, 5.5×10⁻⁵, and 12×10⁻⁵, respectively. The results indicate that A636P is an inactivating mutation and E647K, Y656H, and M729V are silent polymorphisms.

### Example 6

### Construction of an ADE2 Gene Containing a Microsatellite and Generation of a Yeast Strain Exhibiting Single-Colony Colorimetric Indicators of DNA Mismatch Repair Function

[0075] A microsatellite sequence was introduced at the 5′ end of the yeast ADE2 gene coding sequence (SEQ ID NO: 618) as follows. The yeast ADE2 translation initiation codon and 187 bp 5′ flanking DNA coding sequence was PCR amplified from S. cerevisiae S288C DNA using the primers SEQ ID NO: 232 and SEQ ID NO: 233. The ADE2 coding sequence from codon 2 to 36 bp 3′ to the termination codon were PCR amplified from S. cerevisiae S288C DNA using the primers SEQ ID NO: 234 and SEQ ID NO: 235. The approximately 216 bp and 1808 bp DNA fragments were mixed in approximately equimolar amounts and subjected to overlap extension PCR amplification (53) using primers SEQ ID NO: 232 and SEQ ID NO: 235. The predominant PCR product was the approximately 1998 bp overlap extension product. Accurate overlap extension in this reaction would yield an ADE2 gene with the DNA sequence SEQ ID NO: 236 at the 5′ end, inserted between the first (ATG) and second (GAT) codons of the ADE2 gene. This modified gene is termed ADE2::MS3::ADE2 (SEQ ID NO: 619). When translated in yeast, this gene would encode a fusion protein with the amino acids SEQ ID NO: 237 inserted between the first and second amino acid residues of the native yeast ADE2p (FIG. 3A).

[0076] The DNA from the overlap extension PCR amplification was purified using the Wizard DNA Purification kit (Promega, Madison, Wis.) and introduced by transformation (36) into either S. cerevisiae strain YBT24; pSH91 (Example 1) or YBT25; pSH91 (Example 4). Transformants were selected on plates lacking adenine (SD, H, Ly). Individual transformants were subsequently grown in liquid cultures in SD, H, Ly, diluted and plated for single colonies on plates containing low concentrations of adenine (SD, H, Ly, 4 μg/mL adenine). As described previously (54), cells that do not express the ADE2 gene form pink colonies on, these plates due to the accumulation of an intermediate in adenine biosynthesis. The individual transformants grown in liquid culture (above) were screened for those that formed a high percentage of sectored colonies on low adenine plates. These represent strains with an unstable ADE2 gene (mutates at a high frequency), presumably because the native chromosomal gene was replaced by the overlap extension product containing a microsatellite in the ADE2 coding sequence. One clone from each transformation was shown to have the native ADE2 chromosomal gene replaced by the microsatellite-containing gene by PCR amplification of chromosomal DNA using ADE2-specific and microsatellite-specific primers (data not shown). Strain YBT39 has the genotype MATα ADE2::MS3::ADE2 his3-Δ200 leu2-Δ1 lys2-801 trp1-Δ63 ura3-52 msh2Δ::LEU2 and strain YBT40 has the genotype MATα ADE2::MS3::ADE2 his 3-Δ200 leu2-Δ1 lys2-801 trp1-Δ63 ura3-52 mlh1Δ::LEU2, where MS3 refers to SEQ ID NO: 236 inserted between the first and second codons of the native ADE2 gene coding sequence.

[0077] Similar procedures were used to construct another yeast strain containing an mlh1 chromosomal gene disruption and the microsatellite containing ADE2 gene, except that a larger ADE2 targeting sequence was used at the 5′ end. The yeast ADE2 translation initiation codon and 644 bp 5′ flanking DNA coding sequence was PCR amplified from S. cerevisiae S288C DNA using the primers SEQ ID NO: 238 and SEQ ID NO: 233. The ADE2 coding sequence from codon 2 to 36 bp 3′ to the termination codon was PCR amplified from S. cerevisiae S288C DNA using the primers SEQ ID NO: 234 and SEQ ID NO: 235. The approximately 673 bp and 1808 bp DNA fragments were mixed in approximately equimolar amounts and subjected to overlap extension PCR amplification (53) using primers SEQ ID NO: 238 and SEQ ID NO: 235. The predominant PCR product was the approximately 2452 bp overlap extension product. The overlap extension PCR product was purified and used to transform strain YBT24; pSH91 selecting for adenine prototrophs. Individual transformants were screened as above to identify clones with an unstable ADE2 gene. Yeast strain YBT41 was shown to have the native ADE2 chromosomal gene replaced by the microsatellite-containing gene by PCR amplification of chromosomal DNA using ADE2-specific and microsatellite-specific primers (data not shown). Strain YBT41 has the genotype MATα ADE2::MS3::ADE2 his3-Δ200 leu2-Δ1 lys2-801 trp1-Δ63 ura3-52 mlh1Δ::LEU2, where MS3 refers to SEQ ID NO: 236 inserted between the first and second codons of the native ADE2 gene coding sequence.

[0078] The above strains were transformed with either the empty expression vector pMETc or pMETc containing an appropriate yeast mismatch gene for that particular strain. The transformed yeast strains were grown in liquid cultures lacking adenine, diluted and plated on plates containing 4 μg/mL adenine (100-250 colonies per plate). After two days growth at 30° C. and two days growth at room temperature, the plates were evaluated for colony color with the results summarized in Table 9. A number of plates from each strain were examined and the range of colony colors observed under these conditions is indicated. The results demonstrate that with wild-type DNA mismatch repair function (chromosomal gene disruption complemented by plasmid expressed wild type gene), all the cells on plates containing low adenine form normal white colonies. In the absence of a plasmid expressed gene, however, a significant percentage of the cells form pink and/or sectored colonies due to mutation of the ADE2-MS3-ADE2 gene. Such sectored colonies are not observed when the mismatch repair deficient strains contain a native ADE2 gene (data not shown) indicating that the high mutation rate is due to the introduced microsatellite sequence (MS3). Strain YBT41 consistently had a higher frequency of sectored colonies (for reasons that are not clear at this time).

### Example 7

### Additional Functional Analysis of Hybrids MLH1_h(41-86) and MLH1_h(77-134)

[0079] Plasmids. Plasmids pMLH1_h(41-86) and pMLH1_h(77-134) are identical to pMLH1 (see Example 3) but contain codons encoding human MLH1p amino acid residues 41-86 and 77-134, respectively, in place of the homologous codons of yeast MLH1 (26).

[0080] Results. The human-yeast hybrid genes MLH1_h(41-86) (SEQ ID NO: 118) and MLH1_h(77-134) (SEQ ID NO: 119) encode chimeric MLH1 proteins that contain 46 and 58 amino acid regions, respectively, of human MLH1p replacing the homologous region of yeast MLH1p. When expressed in haploid yeast cells containing a deletion of the chromosomal MLH1 gene these hybrids were active in MMR in a standardized in vivo assay that measures the frequency of frameshift mutations in an in-frame (GT)₁₆G microsatellite preceding the URA3 gene (26, 34). In the present invention, the function of MLH1_h(41-86) and MLH1_h(77-134) was confirmed and extended using in vivo MMR assays that employ other reporter genes. The first assay involved transformation of the haploid-yeast strain YBT41, which contains an MLH1 deletion and the ADE2::MS3::ADE2 allele (FIG. 3A), and this assay allowed a determination of MMR proficiency based on the color of individual colonies (Example 6). Strain YBT41 was transformed with pMLH1, pMLH1_h(41-86), pMLH1_h(77-134) and pMETc, the expression vector lacking an MLH1 gene, and histidine prototrophs were selected on plates containing low concentrations (4 μg/ml) of adenine (FIG. 4). When YBT41 was transformed with pMETc, and thus did not express MLH1p, >95% of the colonies were red-white sectored (Table 10, “None”). This sectoring is probably due to instability of the in-frame MS3 microsatellite resulting in frameshift mutations in the ADE2 gene. In contrast, when transformed with pMLH1, a vector expressing the wild-type yeast MLH1 gene, <2% of the colonies were sectored. It is likely that the integrity of the in-frame ADE2::MS3::ADE2 allele is maintained by the MMR process such that >98% of the colonies appeared white. When YBT41 was transformed with hybrids MLH1_h(41-86) and MLH1_h(77-134) the percentage of colonies exhibiting a red-white sectored appearance was 14% and <2%, respectively (Table 10).

[0081] In the second MMR assay yeast colonies were grown in liquid culture and assayed for forward mutation to canavanine resistance as described in Example 4. Yeast strain YBT24 (mlh1Δ) was transformed with pMLH1, pMLH1_h(41-86), pMLH1_h(77-134) and pMETc and individual colonies were assayed by fluctuation tests to determine CAN1 mutation rates (Table 10). YBT24 containing the empty expression vector pMETc exhibited a mutation frequency of 3.1×10⁻⁵ while the strain expressing the native yeast MLH1 gene (pMLH1) exhibited a mutation frequency of 7.1×10⁻⁷. This represents a mutation defect of 44 for yeast cells lacking MLH1p. The mutation frequencies of yeast cells expressing MLH1_h(41-86) and pMLH1_h(77-134) were 2.8×10⁻⁶ and 1.7×10⁻⁶, respectively, which corresponded to mutation defects of 4.0 and 2.4. Taken together the results demonstrate that MLH1 proteins encoded by MLH1_h(41-86) and MLH1_h(77-134) are functional in the repair of a variety of DNA mismatch structures. Although the mutation frequencies exhibited by cells expressing the human-yeast hybrid genes are slightly elevated compared to those levels exhibited by cells expressing the native yeast MLH1 gene, the mutation frequencies conferred by the hybrids are at least 10-fold lower than those levels exhibited by yeast cells lacking any functional MLH1p. The complementation efficiencies for MLH1_h(41-86) and MLH1_h(77-134) are consistent with previous studies (26), and show that MLH1_h(77-134) may be slightly more proficient than MLH1_h(41-86) in MMR.

### Example 8

### Identification of Novel MLH1 Variants that Cause Loss of Mismatch Repair Function

[0082] Technology for the selection, screening and identification of MLH1 mutations causing loss-of-MMR was described in a previous patent application (WO 02/081624 A3, published Oct. 17, 2002). As described therein use of this technology led to the isolation of 39 MLH1p variants which contain a single amino acid alteration which confers loss-of-MMR activity (27). In this invention, the original method and a new, novel method (Method “b”, described below) were used to isolate additional MLH1p variants which lack MMR function and thus, may be used for the diagnosis of cancer susceptibility.

[0083] Error-prone PCR and in vivo gap repair cloning. Pools of mutant MLH1 gene fragments were generated by error-prone PCR using Mutazyme™ (a component of the GeneMorph PCR mutagenesis kit; Stratagene, La Jolla, Calif.) or Taq (Promega, Madison, Wis.) DNA polymerases, which have different misincorporation biases (55). The use of both enzymes should ensure that pools of mutagenized DNA are representative of all possible base substitutions. XhoI-linearized plasmids pMLH1_h(41-86) and pMLH1_h(77-134) were used as templates in PCR mixes containing the buffers, nucleotides, and enzyme concentrations recommended by the manufacturer of each DNA polymerase. The upstream and downstream primers were SEQ ID NO: 35 and SEQ ID NO: 239, respectively, which amplify a 401-bp fragment spanning the human portion of each hybrid MLH1 gene. In preliminary experiments the upstream primer SEQ ID NO: 240 was used to generate a fragment of 475-bp. The protocol for temperature cycling was: 94° C./2 min; 33 cycles of 94° C./36 sec, 55° C./1 min, 72° C./2 min; and 72° C./10 min. Conditions of high and low fidelity were manipulated by varying the amount of template DNA (3-74 ng) in reactions containing Mutazyme and the MgCl₂ concentration (1.5-2.5 mM) in reactions containing Taq DNA polymerase. PCR fragments were purified with Wizard™ PCR preps (Promega, Madison, Wis.) and used for in vivo gap repair cloning in yeast (54, 56, 57). Briefly, 0.5 μg purified PCR product was combined with 0.4 μg ClaI-AatII digested pMLH1 vector and the DNA mixture was co-transformed into YBT24 or YBT41 containing pSH91. Yeast cells in which fragment and vector recombine were converted to histidine prototrophy due to the presence of the HIS3 marker gene on the pMLH1 expression vector. This process typically yielded ≈500 transformants (i.e. colonies) per plate; while equivalent transformations performed with restricted vector alone exhibited very few (<5) colonies per plate.

[0084] Semi-quantitative assays for screening of MMR activity. Screening of transformants for MMR proficiency was carried out using either of two methods depending on whether YBT24 or YBT41 was the host strain for in vivo gap repair cloning. Method “a”: When gap repair cloning was carried out in YBT24 containing pSH91, transformants were assayed sequentially using a spot test for FOA resistance and a patch test for canavanine (CAN) resistance exactly as described previously (27). Briefly, individual clones from the transformation were grown in 3 ml SD (0.67% yeast nitrogen base without amino acids, 2% dextrose) medium containing adenine and lysine (Day 1 culture) and the next day 120 μl of the saturated culture was subinoculated into 3 ml fresh SD medium containing adenine, lysine and uracil. The addition of uracil in the medium allows growth of cells containing a ura3 mutation arising from a frameshift in the (GT)₁₆G-tract of pSH91. These ura3 mutants exhibit a 5-fluoroorotic acid (FOA)-resistant phenotype (25, 34). Following 24 hours growth, 4 μl of the culture was spotted in duplicate on SD plates containing adenine, lysine, uracil and 1 mg/ml FOA (Toronto Research Chemicals Inc., ON, Canada). The plates were incubated at 30° C. for 48 hours and then scored by counting the number of FOA-resistant colonies on each spot. Transformants that exhibited few colonies (<15; typically 0 to 5) per spot were scored as having low levels of MSI (i.e. MMR proficient) and were not analyzed further. Transformants that exhibited many colonies (≧15; typically 20 to 50) per spot were scored as having high levels of MSI (i.e. MMR deficient) and were arrayed on a master plate by applying 25 μl the Day 1 cultures to SD plates containing adenine and lysine. These clones were subjected to a secondary assay based on spontaneous forward mutations in the arginine permease gene (CAN1), which cause resistance to canavanine. A 1 μl loopful of cells from the arrayed transformants were patched out on SD plates containing adenine, lysine and 60 μg/ml canavanine. Plates were incubated three days at 30° C. and scored by counting the number of canavanine-resistant colonies. Yeast clones that exhibited few colonies (<15) were scored as having low levels of genetic instability (i.e. normal in MMR) and were not analyzed further. Clones that exhibited many colonies (≧15; typically 30 to 100) were selected for further analysis. Method “b”: When in vivo gap repair was carried out in yeast strain YBT41 (see Examples 6 and 7), the transformed cells were plated directly on SD plates containing low concentrations (4 μg/ml) of adenine and incubated for 4-5 days. As described previously (54), cells that do not express the ADE2 gene form red colonies due to the accumulation of an intermediate in adenine biosynthesis while cells expressing a wild-type ADE2 gene form white colonies. When the ADE2::MS3::ADE2 allele is unstable (i.e. mutates to ade- at a high frequency due to instability of the MS3 microsatellite) the strain forms a white colony with red sectors on plates containing low adenine (see Example 6). In Method “b”, after gap repair transformation and plating on low adenine, colonies that exhibit abundant red-white sectoring were selected for further analysis. This method allowed single-step cloning and identification of MMR-deficient transformants since MMR deficient cells exhibit red-white sectoring directly on transformation plates (containing low concentrations of adenine).

[0085] Preparation of Yeast DNA and Isolation of Mutant MLH1 Expression Vectors. Total Yeast DNA was prepared from 15 ml liquid cultures using the glass-bead method (58) and resuspended in 50 μl H₂O. To recover mutant plasmids from the yeast strain a 15 μl aliquot of each DNA sample was digested with BamHI, which restricts the pSH91 expression vector but not the MLH1 expression vector, and shuttled into E. coli strain DH5α by electroporation using a BTX ECM399 system (Genetronics, Inc., San Diego, Calif.). Bacterial colonies were selected by growth on LB plates containing 50 μg/ml ampicillin and plasmid DNA was purified using the Wizard Plus SV Minipreps kit (Promega, Madison, Wis.).

[0086] DNA sequencing. DNA sequencing was performed at commercial facilities using dye-terminator chemistry and automated sequencers (ABI models 377 and 3700, Applied Biosystems, Foster City, Calif.). Chromatogram and text files were analyzed with Chromas (version 1.45, http://technelysium.com.au/chromas.html) and GeneRunner (version 3.04, Hastings Software Inc.) software, respectively. Sequencing was carried out in both the forward and reverse directions using primers SEQ ID NO: 241, SEQ ID NO: 239, SEQ ID NO: 242 and/or SEQ ID NO: 243.

[0087] Quantitative in vivo MMR assays. Standardized MMR assays based on mutation to ura3 FOA^{R} were performed as described previously (see Example 1).

[0088] MLH1p accession numbers, alignment and mutation databases. Homo sapiens, NP_{—}000240; Mus musculus, Q9JK91; Rattus norvegicus, NP-112315; Drosophila melanogaster, NP_{—}477022; Saccharomyces cerevisiae, NP_{—}013890; Schizosaccharomyces pombe, NP_{—}596199; Arabidopsis thaliana, NP_{—}567345; Caenorhabditis elegans, NP_{—}499796; Escherichia coli, NP_{—}418591; Staphylococcus aureus, Q93T05. Sequences were retrieved from the Protein Database of the National Center for Biotechnology Information (http://www.ncbi.nlm.nih.gov) and aligned using ClustalW (http://www.ebi.ac.uk/clustalw/). Human MLH1 alterations referenced in the text were reported in one or more of the following public mutation databases: International Collaborative Group on HNPCC (http://www.nfdhtl.nl), Human Gene Mutation Database (http://www.uwcm.ac.uk) and Swiss-protein (http://www.expasy.ch). The databases were last examined Aug. 29, 2003.

[0089] Results. To generate mutations in MLH1, 5′-end fragments of the MLH1_h(41-86) and MLH1_h(77-134) genes were synthesized by error-prone PCR and cloned directly in yeast by gap-repair transformation (FIG. 3B). Three hundred to 1000 colonies, each representing a cloned PCR fragment, were obtained for each gap-repair transformation. Two methods based on semi-quantitative MMR assays were employed to identify colonies having a deficiency in MMR. In initial experiments strain YBT24 containing pSH91 was used for in vivo gap repair (Method “a”). Colonies were screened for resistance to FOA (ura3) by a spot test and those that exhibited a high number of FOA-resistant colonies compared to transformants containing unmutagenized hybrid plasmid were then subjected to canavanine patch analysis to confirm the MMR-deficient phenotype. The second screening method (Method “b”) utilized strain YBT41 (Example 6) for in vivo gap repair and was based on the selection of red-white sectored (i.e., MMR-deficient) colonies.

[0090] Hybrid human-yeast MLH1 expression plasmids were isolated from 387 transformants that exhibited MMR deficiency. DNA sequencing revealed that 60 of the transformants harbored hybrid MLH1 genes that were identical to the unmutagenized parental gene. This number of false-positives was not surprising considering the observation that yeast carrying an functional MLH1 gene occasionally exhibit a mutator phenotype (Table 10 and data not shown). The origin of these false-positives remains undetermined but it is possible that the mutator phenotype in these clones results from a spontaneous mutation in another endogenous MMR gene or the presence of pre-existing mutations in the reporter gene before transformation with an MLH1 gene. The remaining 327 sequenced genes exhibited at least one alteration in the mutagenized region. More specifically, there were 24 (7.3%) hybrid MLH1 genes that contained a frameshift mutation and 16 (4.9%) that contained a termination codon (Table 11). The identification of these types of mutations validated the screening strategy because they would be expected to encode truncated MLH1 proteins that lack MMR function. There were 129 (39%) plasmids that contained multiple (2 or more) alterations in the hybrid MLH1 genes and these were not analyzed further. Finally, there were 158 (48%) hybrid MLH1 genes that contained a single missense codon; these represented the most abundant type of alteration found in the screen. To verify that these missense mutations were bona fide loss-of-MMR function mutations, the isolated plasmids containing each variant gene was re-introduced into the parental strain (YBT24) for quantitative MMR assays (based on stability of the (GT)₁₆G microsatellite in pSH91; see below).

[0091] Mutation frequencies of YBT24; pSH91 containing mutant hybrid MLH1 genes were determined and compared to those levels exhibited by YBT24; pSH91 containing the appropriate parental hybrid gene or the empty expression vector pMETc and results for representative variants are depicted in FIG. 5. Mutation frequencies of 2.1-2.7×10⁻³ were exhibited by yeast cells carrying hybrid MLH1_h(41-86) genes with S44F, 147S, L56P, 159T, D63Y, 168N substitutions in the human portion of the hybrid and a V110A substitution in the yeast portion. These mutation frequencies were similar to the mutation frequency conferred by the pMETc expression vector (2.3×10⁻³) and approximately 10-fold greater than the mutation frequency conferred by the parental hybrid MLH1_h(41-86) (2.9×10⁻⁴) indicating that these variants confer a significant loss-of-MMR function. Hybrid MLH1_h(77-134) genes with A103T, T114I, T115S and K118N substitutions in the human portion and L56H, N61S and G62E substitutions in the yeast portion conferred mutation frequencies of 2.0-4.6×10⁻³. These mutation frequencies were similar to the mutation frequency conferred by the pMETc expression vector (2.0×10⁻³) and were approximately 20-fold greater than the mutation frequency conferred by the parental hybrid MLH1_h(77-134) (1.4×10⁻⁴), indicating that these variants also confer a significant loss-of-MMR function. All of the hybrid MLH1 genes containing single missense codons were verified by quantitative in vivo MMR assays as described above and the results are listed in Tables 12 and 13.

[0092] Each of the 158 MLH1 variants containing a missense codon was tested in quantitative MMR assays as described above. To confirm loss-of-MMR function, we assigned a level of 2 or greater for the mutation defect. This level represents a mutation frequency twice as high as the parental MLH1_h(41-86) and MLH1_h(77-134) hybrids and exceeds the maximal levels typically observed for these hybrids (Tables 12 and 13, footnotes). The results of the quantitative MMR assays demonstrated that 151 of the isolated variants (representing 124 non-redundant alterations) exhibited a mutation defect of 2.1 or more. As listed in Tables 12 and 13 [for variants of MLH1_h(41-86) and MLH1_h(77-134), respectively] a range of MMR defects was apparent and the vast majority of missense codons conferred a substantial loss-in-MMR function (Tables 12 and 13, ++ and +++). In addition to amino acid substitutions that impaired MMR activity, seven amino acid substitutions conferred little-to-no loss of MMR in qualitative assays and were classified as silent polymorphisms (Table 14). Variants containing these alterations probably arose as false-positives in the prospective screen. A comparison of the amino acid substitutions which had a deleterious effect on MMR activity revealed four alterations [D41G (human)/D38G (yeast), T45I (human)/T42I (yeast), E53V (human)/E50V (yeast), 168N (human)/165N (yeast)] that predict identical amino acid substitutions in the equivalent human and yeast residues. Additionally, three alterations [137T (yeast), F80L (human), G144S (yeast)] were isolated in the same codon using different hybrids. Identification of equivalent mutations in different hybrids further supports the notion that these substitutions confer detrimental effects on MMR function. In total, 117 unique amino acid substitutions in the NH₂-terminal end of MLH1p have been shown to cause a loss-of-MMR function. As compared to an alignment of MLH1p orthologs, the majority of these substitutions occur at highly conserved amino acid residues (FIG. 6). Interestingly, eight substitutions (corresponding to human MLH1p I19F, N38S, S44F, N64S, G67E, I68N, C77R and K84E) have been previously reported as possible pathogenic mutations in the human population.

[0093] This particular example illustrates a novel method for the identification of new human MMR gene sequences which result in MMR proteins that do not function in MMR and hence, if carried by and individual, cause a predisposition to develop cancer. The method employs the yeast Saccharomyces cerevisiae, which has been used previously for the identification mutant MMR genes. For example, Jeyaprakash et al. (1996) used genetic complementation experiments and then direct cloning and DNA sequencing to ascertain the identity of the mutant gene in yeast strains with preexisting defects in microsatellite stability. More recent reports describe global mutagenesis of yeast DNA, selection of yeast strains for those having alterations in MMR gene activity followed by cloning and DNA sequencing (59-62). It should be noted that these studies were focused on finding variants of the native yeast (not human) proteins and exploring the structure and function of the mutant in yeast. Indeed, if reported at all, expression of the human MMR proteins in yeast has either no known effect (ex. MSH2, MSH3, MSH6) or causes a dominant negative phenotype i.e. the normal human protein causes a significant increase the yeast's mutation rate (MLH1, and the MSH2-MSH6 heterodimer) (63, 64). Previous studies have attempted to bypass these impediments by using, for example, an hMSH2-ADE2 fusion gene to screen for stop codons in the hMSH2 coding sequence or assays based on gain or loss of the dominant mutator phenotype (63-65). However, these assays do not reflect the biological effect of the protein. We have solved this problem by inventing hybrid human-yeast MMR proteins (see WO 02/081624 A3, published Oct. 17, 2002; and Examples 2 and 5 herein) that retain their biological function for MMR. These hybrids have allowed the development of biologically relevant assays in yeast for identification of human MMR gene mutations. To date, the most similar work relating to this aspect of the present invention was published WO 02/081624 A3. However the method described here is based on a colorimetric screen using a novel yeast strain and ADE2 reporter gene and has the important advantages of being more rapid and reliable than the method described earlier. It should also be pointed out that ADE2 reporter genes have been used in two of the aforementioned reports (61, 65). Although ADE2-based reporter genes are commonly used in yeast due to their utility in colorimetric cell-based screens, the present ADE2 reporter is presumed to be novel (ADE2::MS3::ADE2) and contains a microsatellite sequence, which we have developed and engineered into the 5′ end of the gene. These reagents and refinement of their performance characteristics have resulted in a method which, it is believed, could not have been predicted based on earlier work and should have important clinical utility for determinations of an individual's susceptibility to develop cancer.

### Example 9

### Functional Analysis of MLH1p Having Missense Alterations at Human Codon S44

[0094] Rationale. A spectrum of codon alterations at human MLH1 codon 44 were analyzed to provide functional information about MLH1 amino acid substitutions and to investigate how genetic variability at a single codon affects MMR activity. As reported in a previous patent application (WO 02/081624 A3, published Oct. 17, 2002), 13 of the 20 possible amino acid substitutions at MLH1 residue S44 were assayed for their effects on MMR. In this invention functional information on the remaining 6 amino acid substitutions (S44M, S44N, S44K, S44D, S44E, and S44G) has been determined.

[0095] Plasmids. Oligonucleotides SEQ ID NO: 105 (for S44M), SEQ ID NO: 106 (for S44N), SEQ ID NO:107 (for S44K), SEQ ID NO: 108 (for S44D), SEQ ID NO:109 (for S44E), and SEQ ID NO:110 (for S44G) were obtained from Bio-Synthesis Inc. (Lewisville, Tex.). Each oligonucleotide was used in combination with oligonucleotide SEQ ID NO: 111 to amplify a 122-bp portion of the human MLH1 gene from cDNA clone ATCC#217884 (American Type Culture Collection, Rockville, Md.) Amplification was carried out by PCR and utilized Pfu DNA polymerase (Stratagene, La Jolla, Calif.) according to the manufacturer's instructions. The PCR cycling conditions were as follows: 95° C. for 2 min; 33 cycles of 95° C. for 36 sec, 55° C. for 1 min, 72° C. for 2 min; and 72° C. for 10 min. The resulting fragments were digested with ClaI and AatII, which cleave at sites introduced in the PCR primers, and ligated into ClaI-AatII digested pMLH1 replacing a portion of the native yeast MLH1 gene. This cloning strategy generates yeast expression vectors identical to that encoding the human-yeast hybrid MLH1_h(41-86) (SEQ ID NO: 118) except for the indicated amino acid replacement. Plasmids encoding the hybrid MLH1 proteins MLH1_h(41-86)S44M (SEQ ID NO: 112), MLH1_h(41-86)S44N (SEQ ID NO: 113), MLH1_h(41-86)S44K (SEQ ID NO: 114), MLH1_h(41-86)S44D (SEQ ID NO: 115), MLH1_h(41-86)S44E (SEQ ID NO: 116), and MLH1_h(41-86)S44G (SEQ ID NO: 117), were introduced into the mlh1-deletion strain YBT24 containing pSH91 and functionally tested in the standardized MMR assay (see Example 1). Three independent mutant clones for each variant were tested with identical results. One clone was sequenced in both directions to confirm the appropriate codon change and validate the PCR-amplified sequence of the hybrid molecule. The mutation frequencies below a derived from replicate cultures of a single mutant clone that had been confirmed by DNA sequencing.

[0096] Results. As shown in FIG. 7, the mutation frequency YBT24 containing pSH91 and the hybrid MLH1_h(41-86) was 2.67×10⁻⁴. In contrast, the strain YBT24 containing pSH91 and the expression vector pMETc (lacking an MLH1 gene) was 3.0×10⁻³. The elevated mutation frequency exhibited by the mlh1-deficient strain represents a mutation defect of 11.2. Expression vectors containing the hybrid MLH1_h(41-86) with the substitutions S44D, S44E, S44G, S44K, S44M, and S44N exhibited mutation frequencies from 1.76 to 2.96×10⁻³ (FIG. 7). These values represent mutation defects of 11.1, 9.8, 6.6, 9.1, 10.4, and 10.2 respectively. The results indicate that MLH1 proteins containing the alterations S44M, S44N, S44K, S44D, S44E, and S44G exhibit impaired MMR activity.

[0097] The functional information reported here combined with data from a previous patent application (WO 02/081624 A3, published Oct. 17, 2002) completes the analysis of human MLH1 codon 44. In summary, 18 of 20 amino acids at codon 44 result in substantial loss-of-MMR function (FIG. 7). Only codons which encode serine (S) (the wild-type human amino acid) and alanine (A) (the wild-type yeast amino acid at the corresponding position) gave rise to a protein with levels of MMR activity. Interestingly, an alignment of the amino acid sequences of MLH1 from 8 other species ranging from E. coli to mouse shows that only serine and alanine appear in this position (Example 6). Because the majority of amino acid substitutions at residue 44 lead to loss-of-MMR function, it is concluded that genetic variability at this codon must be quite limited in order to maintain proper function of the MLH1 protein.

### Example 10

### Functional Analysis of Mlh1p Having Missense Alterations at Human Codon K43

[0098] Plasmids. An oligonucleotide with the sequence 5′-CTG TAT CGA TGC ANN NTC CAC AAG TAT TCA AGT G-′3 (SEQ ID NO: 120), where “N” represents any of the four nucleotides A, C, G, or T, was obtained from Bio-Synthesis Inc. (Lewisville, Tex.). The random incorporation of nucleotides at this triplet, creates the possibility for a collection of oligonucleotides containing all 64 possible codon (encoding all 20 possible amino acids) alterations at this position. Oligonucleotide SEQ ID NO: 120 in combination with oligonucleotide SEQ ID NO: 111, was then used to amplify a 122-bp portion of the hMLH1 gene using hMLH1 cDNA clone ATCC#217884 as a template. Amplification utilized Pfu DNA polymerase (Stratagene, La Jolla, Calif.) according to the manufacturer's instructions and cycling conditions were as follows: 95° C. for 2 min; 33 cycles of 95° C. for 36 sec, 55° C. for 1 min, 72° C. for 2 min; and 72° C. for 10 min. The resulting fragment was digested with ClaI and AatII and ligated into pMLH1 replacing the corresponding portion of the native MLH1 gene. Cloning generated a pool of molecules identical to pMLH1_h(41-86) except for the randomized codon at hMLH1 codon 43. Transformation into E. coli DH5a generated a collection of colonies that each contain a genetically different pMLH1_h(41-86) molecule. Plasmid DNA from individual colonies was purified using Wizard Plus SV Minipreps (Promega, Madison, Wis.) and then analyzed by DNA sequencing to confirm the sequence of the amplified region and, importantly, to determine the codon present at hMLH1 position 43. Plasmids containing codons for 13 of the 20 possible amino acid substitutions were identified in this way. Plasmids containing codons for the 7 remaining amino acid substitutions were generated by direct cloning of PCR products. Briefly, oligonucleotides SEQ ID NO: 244 (for K43C), SEQ ID NO: 245 (for K43E), SEQ ID NO: 246 (for K43H), SEQ ID NO: 247 (for K43K), SEQ ID NO: 248 (for K43P), SEQ ID NO: 249 (for K43Q) and SEQ ID NO: 250 (for K43W) were obtained from Bio-Synthesis Inc. (Lewisville, Tex.). Each oligonucleotide was used in combination with oligonucleotide SEQ ID NO: 111 to amplify a 122-bp portion of the human MLH1 gene from cDNA clone ATCC#217884 (American Type Culture Collection, Rockville, Md.) Amplification was carried out by PCR and utilized Pfu DNA polymerase (Stratagene) according to the manufacturer's instructions. The PCR cycling conditions were as follows: 95° C. for 2 min; 33 cycles of 95° C. for 36 sec, 55° C. for 1 min, 72° C. for 2 min; and 72° C. for 10 min. The resulting fragments were digested with ClaI and AatII, which cleave at sites introduced in the PCR primers, and ligated into ClaI-AatII digested pMLH1 replacing a portion of the native yeast MLH1 gene. The plasmids were verified by DNA sequencing. MLH1_h(41-86) expression plasmids containing all possible amino acid substitutions were transformed into YB24 containing pSH91. Mutation frequencies were determined using the standardized quantitative MMR assay as described in Example 1. The mean mutation frequency ±standard deviation of two to nine independent cultures is shown.

[0099] Results. As shown in FIG. 8, the mutation frequency YBT24 containing pSH91 and the hybrid MLH1_h(41-86) was 2.34×10⁻⁴. In contrast, the strain YBT24 containing pSH91 and the expression vector pMETc (lacking an MLH1 gene) was 3.10×10⁻³. The elevated mutation frequency exhibited by the mlh1-deficient strain represents a mutation defect of 13.2. As expected, MLH1_h(41-86) containing a silent K43K alteration (SEQ ID NO: 254) exhibited MMR activity comparable to the parental hybrid MLH1_h(41-86), while proteins with spontaneous deletions in codons 43 (“frameshift-1”) and 45 (“frameshift-2”) exhibited mutation frequencies that were not significantly different from that conferred by the empty expression vector pMETc (FIG. 8).

[0100] Of the 19 possible MLH1_h(41-86) variants having a amino acid substation at codon 43, fourteen [K43A (SEQ ID NO: 123), K43D (SEQ ID NO: 121), K43E (SEQ ID NO: 252), K43F (SEQ ID NO: 145), K43H (SEQ ID NO: 253), K43I (SEQ ID NO: 127), K43L (SEQ ID NO: 128), K43M (SEQ ID NO: 124), K43P (SEQ ID NO: 255), K43S (SEQ ID NO: 126), K43T (SEQ ID NO: 147), K43V (SEQ ID NO: 146), K43W (SEQ ID NO: 257) and K43Y (SEQ ID NO: 122)] conferred mutation frequencies between 4.6×10⁻⁴ and 2.0×10⁻³ (FIG. 8). These values represent mutation defects of 2.0 to 8.5. The remaining 5 alterations [K43C (SEQ ID NO: 251), K43G (SEQ-ID NO: 143), K43N (SEQ ID NO: 144), K43Q (SEQ ID NO: 256) and K43R (SEQ ID NO: 125)] conferred mutation frequencies of 1.1×10⁻⁴ to 3.8×10⁻⁴ values that represent a mutation defect of 1.6 or less and thus have little or no effect on protein function. While substitutions at residue S44 tended to be more severe (conferring a mutation defect of 5.0 or greater) than those at residue K43, the vast majority of substitutions at both codons impaired MMR activity to some degree. Interestingly, for both residues K43 and S44, the range of substitutions that resulted in little to no loss-of-MMR function closely mirrored the variability observed in nature (FIG. 6).

### ABBREVIATIONS

CRC: colorectal cancer

HNPCC: hereditary nonpolyposis colorectal cancer

MMR: DNA mismatch repair

PCR: polymerase chain reaction

[0101] NY: a codon at position N in a gene (N denoting the number of the codon, where the ATG translation initiation codon is assigned number 1) which encodes the amino acid X (encoding one of the twenty amino acids, the symbols for which are listed below).

[0102] XNY: a codon at position N in a gene (N denoting the number of the codon, where the ATG translation initiation codon is assigned number 1) in which the codon for amino acid X (encoding one of the twenty amino acids, the symbols for which is below) has been changed to codon Y (again represented by one of the twenty symbols below).

A: the amino acid alanine

C: the amino acid cysteine

D: the amino acid aspartic acid

E: the amino acid glutamic acid

F: the amino acid phenylalanine

G: the amino acid glycine

H: the amino acid histidine

I: the amino acid isoleucine

K: the amino acid lysine

L: the amino acid leucine

M: the amino acid methionine

N: the amino acid asparagine

P: the amino acid proline

Q: the amino acid glutamine

R: the amino acid arginine

S: the amino acid serine

T: the amino acid threonine

V: the amino acid valine

W: the amino acid tryptophan

Y: the amino acid tyrosine

### REFERENCES

[0103] 1. Kinzler, K. W. and Vogelstein, B. (1996) Lessons from hereditary colorectal cancer. Cell, 87(2), 159-170.
[0104] 2. Papadopoulos, N. and Lindblom, A. (1997) Molecular Basis of HNPCC: Mutations of MMR Genes. Human Mutation, 10, 89-99.
[0105] 3. Peltomaki, P. and de la Chapelle, A. (1997) Mutations predisposing to hereditary nonpolyposis colorectal cancer. Adv. Cancer Res., 71, 93-119.
[0106] 4. Lynch, H. T. and de la Chappelle, A. (1999) Genetic susceptibility to non-polyposis colorectal cancer. J. Med. Genet., 36, 801-818.
[0107] 5. Peltomaki, P. (2001) Deficient DNA mismatch repair: a common etiologic factor for colon cancer. Hum. Mol. Genet., 10(7), 735-740.
[0108] 6. Mitchell, R. J., Farrington, S. M., Dunlop, M. G. and Campbell, H. (2002) Mismatch repair genes hMLH1 and hMSH2 and colorectal cancer: a HuGE review. Am. J. Epidemiol., 156(10), 885-902.
[0109] 7. Vasen, H. F., Mecklin, J. P., Khan, P. M. and Lynch, H. T. (1991) The International Collaborative Group on Hereditary Non-Polyposis Colorectal Cancer (ICG-HNPCC). Dis. Colon Rectum, 34(5), 424-425.
[0110] 8. Fishel, R. and Wilson, T. (1997) MutS homologs in mammalian cells. Curr. Opin. Genet. Dev., 7, 105-113.
[0111] 9. Jiricny, J. and Nystrom-Lahti, M. (2000) Mismatch repair defects in cancer. Curr. Opin. Genet. Dev., 10, 157-161.
[0112] 10. Kolodner, R. D. and Marsischky, G. T. (1999) Eukaryotic DNA mismatch repair. Curr. Opin. Genet. Dev., 9, 89-96.
[0113] 11. Herman, J. G., Umar, A., Polyak, K., Graff, J. R., Ahuja, N., Issa, J. P., Markowitz, S., Willson, J. K. V., Hamilton, S. R., Kinzler, K. W., Kane, M. F., Kolodner, R. D., Vogelstein, B., Kunkel, T. and Baylin, S. B. (1998) Incidence and functional consequences of hMLH1 promoter hypermethylation in colorectal carcinoma. Proc. Natl. Acad. Sci. USA, 95, 6870-6875.
[0114] 12. Kolodner, R. D. (2000) Guarding against mutations. Nature, 407, 687-689.
[0115] 13. Cahill, D. P., Kinzler, K. W., Vogelstien, B. and Lengauer, C. (1999) Genetic Instability and Darwinian Selection in Tumours. Trends in Biochemical Sciences, 24(12), M57-M60.
[0116] 14. Hanahan, D. and Weinberg, R. A. (2000) The hallmarks of cancer. Cell, 100(1), 57-70.
[0117] 15. Loeb, L. A. (1991) Mutator phenotype may be required for multistage carcinogenesis. Cancer Res., 51, 3075-3079.
[0118] 16. Tomlinson, I. P., Novelli, M. R. and Bodner, W. F. (1996) The mutation rate and cancer. Proc. Natl. Acad. Sci. USA, 93(14800-14803).
[0119] 17. Lengauer, C., Kinzler, K. W. and Vogelstein, B. (1998) Genetic Instabilities in human cancers. Nature, 396, 643-649.
[0120] 18. Loeb, L. A. (2001) A mutator phenotype in cancer. Cancer. Res., 61, 3230-3239.
[0121] 19. Ron, E. (1998) Ionizing radiation and cancer risk: evidence from epidemiology. Radiat. Res., 150(5 Suppl), S30-41.
[0122] 20. Cleaver, J. and Crowley, E. (2002) UV damage, DNA repair and skin carcinogenesis. Fron. Biosci., 7, d1024-1043.
[0123] 21. Hecht, S. S. (2003) Tobacco carcinogens, their biomarkers and tobacco-induced cancer. Nat. Rev. Cancer, 3(10), 733-744.
[0124] 22. Cleaver, J. E. and Kraemer, K. H. (1995) Xeroderma pigmentosum and Cockayne syndrome, 7th Ed. The metabolic and molecular basis of inherited disease (Scriver, C., Beaudet, A., Sly, W., and Valle, D., Eds.), McGraw-Hill, New York.
[0125] 23. Ban, C. and Yang, W. (1998) Crystal structure and ATPase activity of MutL: implications for DNA repair and mutagenesis. Cell, 95, 541-552.
[0126] 24. Tran, P. T. and Liskay, M. R. (2000) Functional studies on the candidate ATPase domains of Saccharomyces cerevisiae MutL. Mol. Cell. Biol., 20, 6390-6398.
[0127] 25. Polaczek, P., Putzke, A. P., Leong, K. and Bitter, G. A. (1998) Functional genetic tests of DNA mismatch repair protein activity in Saccharomyces cerevisiae. Gene, 213, 159-167.
[0128] 26. Ellison, A. R., Lofing, J. and Bitter, G. A. (2001) Functional analysis of human MLH1 and MSH2 missense variants and hybrid human-yeast MLH1 proteins in Saccharomyces cerevisiae. Hum. Mol. Genet., 10(18), 1889-1900.
[0129] 27. Bitter, G. A. and Ellison, A. R. (2002). BTOL Corp., USA.
[0130] 28. Beck, N. E., Tomlinson, I. P., Homfray, T., Hodgson, S. V., Harcopos, C. J. and Bodmer, W. F. (1997) Genetic testing is important in families with a history suggestive of hereditary non-polyposis colorectal cancer even if the Amsterdam criteria are not fulfilled. Br. J. Surg., 84(2), 233-237.
[0131] 29. Syngal, S., Fox, E. A., Li, C., Dovidio, M., Eng, C., Kolodner, R. D. and Garber, J. E. (1999) Interpretation of genetic test results for hereditary nonpolyposis colorectal cancer: implications for clinical predisposition testing. JAMA, 282(3), 247-253.
[0132] 30. Terdiman, J. P., Gum Jr., J. R., Conrad, P. G., Miller, G. A., Weinberg, V., Crawley, S. C., Levin, T. R., Reeves, C., Schmitt, A., Hepburn, M., Sleisenger, M. H. and Kim, Y. S. (2001) Efficient detection of hereditary nonpolyposis colorectal cancer gene carriers by screening for tumor microsatellite instability before germline testing. Gastroenterology, 120, 21-30.
[0133] 31. Giraldo, A., Gomez, A., Salguero, A., Garcia, H., Aristizabal, F., Gutierrez, O., Angel, L. A., Padron, J., Martinez, C., Martinez, H., Malayer, O., Florez, L. and Barvo, R. (2003) hMLH1 and hMSH2 mutations in Colombian families with HNPCC (abstract). Am J. Hum. Genet., 73 (suppl.)(5), 230.
[0134] 32. Woods, M. O., Green, J. S., Robb, D., Pollett, A., Younghusband, B., Gallinger, S., Parfrey, P. S., McLaughlin, J. R. and Bapat, B. (2003), American Association for Cancer Research, 94th Annual Meeting. Cadmus Professional Communications, Toronto, Ontario, Canada, Vol. 44, pp. 1367.
[0135] 33. Mumberg, D., Muller, R. and Funk, M. (1994) Regulatable promoters of Saccharomyces cerevisiae: comparison of transcriptional activity and their use for heterologous expression. Mol. Gen. Genet., 22(25), 5767-5768.
[0136] 34. Strand, M., Prolla, T. A., Liskay, R. M. and Petes, T. D. (1993) Destabilization of tracts of simple repetitive DNA in yeast by mutations affecting DNA mismatch repair. Nature, 365, 274-276.
[0137] 35. Sikorski, R. S. and Hieter, P. (1989) A system of shuttle vectors and yeast host strains designed for efficient manipulation of DNA in Saccharomyces cerevisiae. Genetics, 122(1), 19-27.
[0138] 36. Ito, H., Fukuda, Y., Murata, K. and Kimura, A. (1983) Transformation of intact yeast cells treated with alkali cations. J. Bacteriol., 153, 163-168.
[0139] 37. Godfrey, K. (1985) Statistics in practice: comparing the means of several groups. N Engl J Med, 313(23), 1450-1455.
[0140] 38. Ryder, E. F. and Robakiewicz, P. (1998) In Ausubel, F. M., Brent, R., Kingston, R. E., Moore, D. D., Seidman, J. G., Smith, J. A., and Struhl, K. (eds.), Current protocols in molecular biology. John Wiley and Sons, New York, Vol. supple 43, pp. A.3I.1-22.
[0141] 39. Nakahara, M., Yokozaki, H., Yasui, W., Dohi, K. and Tahara, E. (1997) Identification of concurrent germ-line mutations in hMSH2 and/or hMLH1 in Japanese hereditary nonpolyposis colorectal cancer kindreds. Cancer Epidemiol. Biomarkers Prevent., 6, 1057-1064.
[0142] 40. Guerrette, S., Wilson, T., Gradia, S. and Fishel, R. (1998) Interactions of human hMSH2 with, hMSH3 and hMSH2 with hMSH6: examination of mutations found in hereditary nonpolyposis colorectal cancer. Mol. Cell. Biol., 18(11), 6616-6623.
[0143] 41. Holinski-Feder, E., Muller-Koch, Y., Friedl, W., Moeslein, G., Keller, G., Plaschke, J., Ballhausen, W., Gross, M., Baldwin-Jedele, K., Jungck, M., Mangold, E., Vogelsang, H., Schackert, H. K., Lohsea, P., Murken, J. and Meitinger, T. (2001) DHPLC mutation analysis of the hereditary nonpolyposis colon cancer (HNPCC) genes hMLH1 and hMSH2. J. Biochem. Biophys. Methods, 47(1-2), 21-32.
[0144] 42. Samowitz, W. S., Curtin, K., Lin, H. H., Robertson, M. A., Schaffer, D., Nichols, M., Gruenthal, K., Leppert, M. F. and Slattery, M. L. (2001) The colon cancer burden of genetically defined hereditary nonpolyposis colon cancer. Gastroenterology, 121, 830-838.
[0145] 43. Otway, R., Tetlow, N., Homby, J. and Kohonen-Corish, M. (2000) Evaluation of enzymatic mutation detection in hereditary nonpolyposis colorectal cancer. Human Mutation, 16(1), 61-67.
[0146] 44. Gorlov, I. P., Gorlov, O. Y., Frazier, M. L. and Amos, C. I. (2003) Missense mutations in hMLH1 and hMSH2 are associated with exonic splicing enhancers. Am. J. Hum. Genet., 73, 1157-1161.
[0147] 45. Jeong, S.-Y., Shin, K.-H., Shin, J.-H., Ku, J.-L., Shin, Y.-K., Park, S.-Y., Kim, W.-H. and Park, J.-G. (2003) Microsatellite instability and mutations in DNA mismatch repair genes in sporatic colorectal cancers. Dis. Colon Rectum, 46, 1069-1077.
[0148] 46. Nafa, K., Peterlongo, P., Shia, J., Canale, L., Lerman, G., Glogowski, E., Guillem, J., Markowitz, A., Offit, K. and Ellis, N. A. (2003) Mutational analysis of the mismatch repair genes in HNPCC patients. Am. J. Hum. Genet., 73 (suppl.)(5), 238.
[0149] 47. Wagner, A., Barrows, A., Wijnen, J. T., van der Klift, H., Franken, P. F., Verkuijlen, P., Nakagawa, H., Geugien, M., Jaghmohan-Changur, S., Breukel, C., Meijers-Heijboer, H., Morreau, H., van Puijenbroek, M., Burn, J., Coronel, S., Kinarski, Y., Okimoto, R., Watson, P., Lynch, J. F., de la Chapelle, A., Lynch, H. T. and Fodde, R. (2003) Molecular analysis of hereditary nonpolyposis colorectal cancer in the United States; high mutation detection rate among clinically selected families and characterization of an American founder mutation. Am. J. Hum. Genet., 72, 1088-1100.
[0150] 48. Lea, D. E. and Coulson, C. A. (1949) The distribution of the numbers of mutants in bacterial populations. J. Genet., 49, 264-285.
[0151] 49. Marsischky, G. T., Filosi, N., F., K. M. and Kolodner, R. (1996) Redundancy of Saccharomyces cerevisiae MSH3 and MSH6 in MSH2-dependent mismatch repair. Genes Dev., 10, 407-420.
[0152] 50. Lamers, M. H., Perrakis, A., Enzlin, J. H., Winterwerp, H. H. K., de Wind, N. and Sixma, T. K. (2000) The Crystal Structure of DNA Mismatch Repair Protein MutS binding to a G:T Mismatch. Nature, 407, 711-717.
[0153] 51. Obmolova, G., Ban, C., Hsieh, P. and Yang, W. (2000) Crystal Structure of Mismatch Repair Protein MutS and its Complex with a Substrate DNA. Nature, 407, 703-710.
[0154] 52. Drotschmann, K., Yang, W., Brownewell, F. E., Kool, E. T. and Kunkel, T. A. (2001) Asymmetric recognition of DNA local distortion. J. Biol. Chem., 276(49), 46225-46229.
[0155] 53. Bitter, G. A. (1998) Function of hybrid human-yeast cyclin-dependent kinases in Saccharomyces cerevisiae. Mol. Gen. Genet., 260, 120-130.
[0156] 54. Bitter, G. A., Schaeffer, T. N. and Ellison, A. E. (2002) Reporter gene regulation in Saccharomyces cerevisiae by the human p53 tumor suppressor protein. J. Mol. Micro. Biotechnol., 4(6), 539-550.
[0157] 55. Cline, J. and Hogrefe, H. (2000) GeneMorph™ PCR mutagenesis kit produces a unique mutational spectrum. Stratagies Newsletter (Stratagene), 13(4), 157-161.
[0158] 56. Scharer, E. and Iggo, R. (1992) Mammalian p53 can function as a transcription factor in yeast. Nucleic Acids Res., 20, 1539-1545.
[0159] 57. Ishioka, C., Frebourg, T., Yan, Y. X., Vidal, M., Friend, S. H., Schmidt, S. and Iggo, R. (1993) Screening patients for heterozygous p53 mutations using a functional assay in yeast. Nat. Genet., 5(2), 124-129.
[0160] 58. Hoffman, C. S. and Winston, F. (1987) A ten-minute DNA preparation from yeast efficiently releases autonomous plasmids for transformation of Escherichia coli. Gene, 57, 267-272.
[0161] 59. Studamire, B., Price, G., Sugawara, N., Haber, J. and Alani, E. (1999) Separation-of-function mutations in Saccharomyces cerevisiae MSH2 that confer mismatch repair defects but do not affect nonhomologous-tail removal during recombination. Mol. Cell. Biol., 19(11), 7558-7567.
[0162] 60. Amin, N. S., Nguyen, M.-N., Oh, S. and Kolodner, R. D. (2001) exo-1 dependent mutator mutations: model systems for studying functional interactions in mismatch repair. Mol. Cell. Biol., 21, 5142-5155.
[0163] 61. Sia, E. A., Dominska, M., Stefanovic, L. and Petes, T. D. (2001) Isolation and characterization of point mutations in mismatch repair genes that destabilize microsatellites in yeast. Mol. Cell. Biol., 21(23), 8157-8167.
[0164] 62. Argueso, J. L., Smith, D., Yi, J., Waase, M., Sarin, S. and Alani, E. (2002) Analysis of conditional mutations in the Saccharomyces cerevisiae MLH1 gene in mismatch repair and in meiotic crossing over. Genetics, 160, 909-921.
[0165] 63. Shimodaira, H., Filosi, N., Shibata, H., Suzuki, T., Radice, P., Kanamaru, R., Friend, S. H., Kolodner, R. D. and Ishioka, C. (1998) Functional analysis of human MLH1 mutations in Saccharomyces cerevisiae. Nature Genet., 19, 384-389.
[0166] 64. Clark, A. B., Cook, M. E., Tran, H. T., Gordenin, D. A., Resnick, M. and Kunkel, T. A. (1999) Functional analysis of human MutSα and MutSβ complexes in yeast. Nucleic Acids Res., 27(3), 736-742.
[0167] 65. Andreutti-Zaugg, C., Scott, R. J. and Iggo, R. (1997) Inhibition of nonsense-mediated messenger RNA decay in clinical samples facilitates detection of human MSH2 mutations with an in vivo fusion protein assay and conventional techniques. Cancer Res., 57, 3288-3293.

[0168] All publications and patent applications mentioned in this specification are herein incorporated by reference to the same extent as if each individual publication or patent application was specifically and individually indicated to be incorporated by reference.

[0169] The invention now being fully described, it will be apparent to one of ordinary skill in the art that many changes and modifications can be made thereto without departing from the spirit or scope of the invention.

TABLE 1

Classification of human DNA mismatch repair
protein variants for cancer presusceptibility
testing*
MLH1
Human MLH1 proteins conferring upon an
individual a greater than normal suscep-
tibility to develop cancer

| | |
|---|---|
| 23D | (SEQ ID NO: 262) |
| 29I | (SEQ ID NO: 263) |
| 38T | (SEQ ID NO: 264) |
| 40F | (SEQ ID NO: 265) |
| 40N | (SEQ ID NO: 266) |
| 40T | (SEQ ID NO: 267) |
| 41E | (SEQ ID NO: 268) |
| 41G | (SEQ ID NO: 269) |
| 41N | (SEQ ID NO: 270) |
| 42E | (SEQ ID NO: 271) |
| 42T | (SEQ ID NO: 272) |
| 42V | (SEQ ID NO: 273) |
| 43A | (SEQ ID NO: 274) |
| 43D | (SEQ ID NO: 275) |
| 43E | (SEQ ID NO: 276) |
| 43F | (SEQ ID NO: 277) |
| 43H | (SEQ ID NO: 278) |
| 43I | (SEQ ID NO: 279) |
| 43L | (SEQ ID NO: 280) |
| 43M | (SEQ ID NO: 281) |
| 43P | (SEQ ID NO: 282) |
| 43S | (SEQ ID NO: 283) |
| 43T | (SEQ ID NO: 284) |
| 43V | (SEQ ID NO: 285) |
| 43W | (SEQ ID NO: 286) |
| 43Y | (SEQ ID NO: 287) |
| 44D | (SEQ ID NO: 288) |
| 44G | (SEQ ID NO: 289) |
| 44K | (SEQ ID NO: 290) |
| 44M | (SEQ ID NO: 291) |
| 44N | (SEQ ID NO: 292) |
| 45I | (SEQ ID NO: 293) |
| 46T | (SEQ ID NO: 294) |
| 47S | (SEQ ID NO: 295) |
| 47T | (SEQ ID NO: 296) |
| 48G | (SEQ ID NO: 297) |
| 48Y | (SEQ ID NO: 298) |
| 49E | (SEQ ID NO: 299) |
| 49M | (SEQ ID NO: 300) |
| 49N | (SEQ ID NO: 301) |
| 51A | (SEQ ID NO: 302) |
| 51D | (SEQ ID NO: 303) |
| 55S | (SEQ ID NO: 304) |
| 56M | (SEQ ID NO: 305) |
| 56P | (SEQ ID NO: 306) |
| 57N | (SEQ ID NO: 307) |
| 59F | (SEQ ID NO: 308) |
| 59H | (SEQ ID NO: 309) |
| 59N | (SEQ ID NO: 310) |
| 59T | (SEQ ID NO: 311) |
| 61N | (SEQ ID NO: 312) |
| 63G | (SEQ ID NO: 313) |
| 63Y | (SEQ ID NO: 314) |
| 64I | (SEQ ID NO: 315) |
| 64S | (SEQ ID NO: 316) |
| 65A | (SEQ ID NO: 317) |
| 65D | (SEQ ID NO: 318) |
| 65E | (SEQ ID NO: 319) |
| 65S | (SEQ ID NO: 320) |
| 65V | (SEQ ID NO: 321) |
| 67W | (SEQ ID NO: 322) |
| 68F | (SEQ ID NO: 323) |
| 68N | (SEQ ID NO: 324) |
| 68S | (SEQ ID NO: 325) |
| 70I | (SEQ ID NO: 326) |
| 70N | (SEQ ID NO: 327) |
| 72G | (SEQ ID NO: 328) |
| 73M | (SEQ ID NO: 329) |
| 73P | (SEQ ID NO: 330) |
| 74L | (SEQ ID NO: 331) |
| 76E | (SEQ ID NO: 332) |
| 77S | (SEQ ID NO: 333) |
| 77Y | (SEQ ID NO: 334) |
| 79W | (SEQ ID NO: 335) |
| 80I | (SEQ ID NO: 336) |
| 80S | (SEQ ID NO: 337) |
| 80V | (SEQ ID NO: 338) |
| 82K | (SEQ ID NO: 339) |
| 82M | (SEQ ID NO: 340) |
| 82S | (SEQ ID NO: 341) |
| 83F | (SEQ ID NO: 342) |
| 83P | (SEQ ID NO: 343) |
| 89G | (SEQ ID NO: 344) |
| 89V | (SEQ ID NO: 345) |
| 91V | (SEQ ID NO: 346) |
| 99I | (SEQ ID NO: 347) |
| 99L | (SEQ ID NO: 348) |
| 100P | (SEQ ID NO: 349) |
| 100Q | (SEQ ID NO: 350) |
| 101D | (SEQ ID NO: 351) |
| 102D | (SEQ ID NO: 352) |
| 102G | (SEQ ID NO: 353) |
| 103T | (SEQ ID NO: 354) |
| 103V | (SEQ ID NO: 355) |
| 111P | (SEQ ID NO: 356) |
| 111T | (SEQ ID NO: 357) |
| 113A | (SEQ ID NO: 358) |
| 114I | (SEQ ID NO: 359) |
| 115E | (SEQ ID NO: 360) |
| 115F | (SEQ ID NO: 361) |
| 115N | (SEQ ID NO: 362) |
| 115S | (SEQ ID NO: 363) |
| 116A | (SEQ ID NO: 364) |
| 118N | (SEQ ID NO: 365) |
| 128P | (SEQ ID NO: 366) |
| 182G | (SEQ ID NO: 367) |
| 193P | (SEQ ID NO: 368) |
| 304V | (SEQ ID NO: 601) |
| 542P | (SEQ ID NO: 369) |
| 549P | (SEQ ID NO: 370) |
| 640S | (SEQ ID NO: 602) |
| 663G | (SEQ ID NO: 371) |
| 755S | (SEQ ID NO: 372) |

Human MLH1 proteins conferring upon an
individual no greater susceptibility to
develop cancer

| | |
|---|---|
| 22A | (SEQ ID NO: 598) |
| 29S | (SEQ ID NO: 373) |
| 32V | (SEQ ID NO: 374) |
| 36L | (SEQ ID NO: 375) |
| 43C | (SEQ ID NO: 376) |
| 43G | (SEQ ID NO: 377) |
| 43N | (SEQ ID NO: 378) |
| 43Q | (SEQ ID NO: 379) |
| 43R | (SEQ ID NO: 380) |
| 62R | (SEQ ID NO: 381) |
| 64D | (SEQ ID NO: 382) |
| 71D | (SEQ ID NO: 383) |
| 75T | (SEQ ID NO: 384) |
| 95T | (SEQ ID NO: 385) |
| 136S | (SEQ ID NO: 386) |
| 141R | (SEQ ID NO: 599) |
| 160V | (SEQ ID NO: 387) |
| 272V | (SEQ ID NO: 388) |
| 286Q | (SEQ ID NO: 600) |
| 441T | (SEQ ID NO: 389) |
| 648L | (SEQ ID NO: 390) |
| 659Q | (SEQ ID NO: 391) |

MSH2
Human MSH2 proteins conferring upon an
individual a greater than normal suscep-
tibility to develop cancer

| | |
|---|---|
| 100/101-del | (SEQ ID NO: 604) |
| 198G | (SEQ ID NO: 392) |
| 199R | (SEQ ID NO: 400) |
| 272V | (SEQ ID NO: 393) |
| 333R | (SEQ ID NO: 90) |
| 338R | (SEQ ID NO: 607) |
| 439-del | (SEQ ID NO: 609) |
| 440P | (SEQ ID NO: 610) |
| 503P | (SEQ ID NO: 394) |
| 534C | (SEQ ID NO: 611) |
| 595R | (SEQ ID NO: 614) |
| 603N | (SEQ ID NO: 615) |
| 622T | (SEQ ID NO: 616) |
| 636P | (SEQ ID NO: 99) |
| 639R | (SEQ ID NO: 93) |
| 683R | (SEQ ID NO: 395) |
| 692R | (SEQ ID NO: 95) |
| 697R | (SEQ ID NO: 96) |
| 751R | (SEQ ID NO: 97) |

Human MSH2 proteins conferring upon an
individual no greater susceptibility to
develop cancer

| | |
|---|---|
| 30L | (SEQ ID NO: 603) |
| 44M | (SEQ ID NO: 396) |
| 61P | (SEQ ID NO: 397) |
| 127S | (SEQ ID NO: 398) |
| 167H | (SEQ ID NO: 399) |
| 186S | (SEQ ID NO: 89) |
| 199W | (SEQ ID NO: 605) |
| 322V | (SEQ ID NO: 606) |
| 323C | (SEQ ID NO: 401) |
| 333Y | (SEQ ID NO: 91) |
| 349L | (SEQ ID NO: 608) |
| 390F | (SEQ ID NO: 402) |
| 390V | (SEQ ID NO: 403) |
| 562V | (SEQ ID NO: 612) |
| 583S | (SEQ ID NO: 613) |
| 609V | (SEQ ID NO: 92) |
| 647K | (SEQ ID NO: 100) |
| 656H | (SEQ ID NO: 101) |
| 683V | (SEQ ID NO: 404) |
| 688I | (SEQ ID NO: 405) |
| 691T | (SEQ ID NO: 94) |
| 722I | (SEQ ID NO: 617) |
| 729V | (SEQ ID NO: 102) |
| 735V | (SEQ ID NO: 406) |
| 770V | (SEQ ID NO: 98) |
| 845E | (SEQ ID NO: 407) |

*entries refer to human MLH1 or MSH2 proteins having the indicated amino acid residue (single letter code, see abbreviations) at the indicated position. Numbering begins with the methionine encoded by codon 1 (start codon, ATG).

[0170] TABLE 2
MLH1 variants examined and oligonucleotides used for making site-directed mutations

| | | Source of | Equivalent | | Restriction |
|---|---|---|---|---|---|
| Gene product | | human variant | substitution | Oligonucleotides used^{d} | site |
| and variant amino acid | | (Reference)^{a,b,c} | in yMLH1 | [(s), sense and (a), anti-sense strand] | alteration^{e} |
| hMLH1 | E23D | (ICG) | E20D | SEQ ID NO: 1 (s) | +EcoRV |
| | | | | SEQ ID NO: 2 (a) | |
| | G67W | (HGMD) | G64W | SEQ ID NO: 3 (s) | +BamHI |
| | | | | SEQ ID NO: 4 (a) | |
| | C77Y | (ICG) | C74Y | SEQ ID NO: 5 (s) | +SspI |
| | | | | SEQ ID NO: 6 (a) | |
| | F80V | (HGMD) | F77V | SEQ ID NO: 148 (s) | −AatII |
| | | | | SEQ ID NO: 149 (a) | |
| | R100P | (ICG) | R97P | SEQ ID NO: 7 (s) | +SmaI |
| | | | | SEQ ID NO: 8 (a) | |
| | E102D | (ICG) | E99D | SEQ ID NO: 9 (s) | −HindIII |
| | | | | SEQ ID NO: 10 (a) | |
| | R182G | (HGMD) | R179G | SEQ ID NO: 11 (s) | None^{f} |
| | | | | SEQ ID NO: 12 (a) | |
| | S193P | (ICG) | S190P | SEQ ID NO: 13 (s) | None^{f} |
| | | | | SEQ ID NO: 14 (a) | |
| | L272V | (ICG) | L272V | SEQ ID NO: 15 (s) | +BstBI |
| | | | | SEQ ID NO: 16 (a) | |
| | A441T | (ICG) | A444T | SEQ ID NO: 17 (s) | None^{f} |
| | | | | SEQ ID NO: 18 (a) | |
| | Q542P | (Terdiman, 2001) | Q552P | SEQ ID NO: 19 (s) | +BspHI |
| | | | | SEQ ID NO: 20 (a) | |
| | L549P | (ICG) | L559P | SEQ ID NO: 21 (s) | +ClaI |
| | | | | SEQ ID NO: 22 (a) | |
| | P648L | (HGMD) | P661L | SEQ ID NO: 150 (s) | +SpeI |
| | | | | SEQ ID NO: 151 (a) | |
| | R659Q | (ICG) | R672Q | SEQ ID NO: 23 (s) | +PvuII |
| | | | | SEQ ID NO: 24 (a) | |
| | E663G | (ICG) | E676G | SEQ ID NO: 25 (s) | +SalI |
| | | | | SEQ ID NO: 26 (a) | |
| | R755S | (Syngal, 1999) | R768S | SEQ ID NO: 27 (s) | +BstBI |
| | | | | SEQ ID NO: 28 (a) | |
| MLH1_h | A29S | (ICG) | — | SEQ ID NO: 152 (s) | +EagI |
| (1-86) | | | | SEQ ID NO: 153 (a) | |
| | I32V | (GeneSnP) | — | SEQ ID NO: 154 (s) | +EagI |
| | | | | SEQ ID NO: 155 (a) | |
| MLH1_h | A128P | (ICG) | — | SEQ ID NO: 156 (s) | +StuI |
| (77-177) | | | | SEQ ID NO: 157 (a) | |
| | A160V | (ICG) | — | SEQ ID NO: 158 (s) | −HindIII |
| | | | | SEQ ID NO: 159 (a) | |

^{a}ICG, variant reported on-line in the database of the International Collaborative Group on Hereditary Nonpolyposis Colorectal Cancer (http://www.nfdht.nl)
^{b}HGMD, variant reported on-line in the Human Gene Mutation Database (http://www.hgmd.org)
^{c}GeneSnP, variant reported on-line in the GeneSnP database (http://www.genome.utah.edu/genesnps/)
^{d}Oligonucleotides with the indicated sequence were used for making site-directed mutations in the indicated MMR gene as described in Examples 1 and 3.
^{e}The restriction site alterations are silent at the amino acid sequence level, except for the indicated substitution. +, restriction site additon; −, restriction site loss.
^{f}Alteration screened by DNA sequencing.

[0171] TABLE 3
Functional consequence of amino acid
substitutions in yeast MLH1p

| | Mutation | Relative |
|---|---|---|
| | frequency × 10⁻⁵ | mutation defect |
| MLH1 Variant | (95% CI) | (range) |
| None | 265 (191-338) | 189 (136-241) |
| MLH1 wildtype | 1.4 (1.2-1.6) | 1.0 (0.8-1.1) |
| G19A | 0.8 | 0.6 |
| E20D | 95.2* | 68 |
| G64W | 315** | 225 |
| C74Y | 83.1* | 59 |
| F77V | 77.9* | 56 |
| R97P | 168* | 120 |
| E99D | 10.8* | 7.7 |
| P138R | 0.7 | 0.5 |
| R179G | 1.9* | 1.4 |
| S190P | 445** | 318 |
| L272V | 0.9 | 0.6 |
| K286Q | 1.6 | 1.1 |
| D304V | 348** | 248 |
| A444T | 1.4 | 1.0 |
| Q552P | 32.6* | 23 |
| R559P | 40.2* | 29 |
| P653S | 15.8* | 11 |
| P661L | 1.8 | 1.3 |
| R672Q | 0.7 | 0.5 |
| E676G | 7.1* | 5.1 |
| R768S | 171** | 122 |

Mutation frequencies, 95% confidence interval (CI), mutation defects and statistical comparisons were determined as described in Example 1. Values are from six independent experiments.
**denotes significantly greater than wild-type MLH1 and significantly greater or not different than “None”.
*denotes significantly greater than wild-type MLH1 and significantly less than “None”. These conclusions were based on comparisons to control values within each independent experiment.

[0172] TABLE 4
Functional analysis of human-yeast hybrid MLH1 genes

| | Mutation | |
|---|---|---|
| Gene | frequency × 10⁻⁵ | Mutation defect |
| None (pMETc vector) | 174; 303 | 144; 193 |
| MLH1 | 1.2; 1.6 | 1.0 |
| MLH1_h(175-267) | 30.8 | 25.4 |
| MLH1_h(175-214) | 89.4 | 56.9 |
| MLH1_h(208-267) | 5.7 | 3.7 |
| MLH1_h(265-341) | 48.3 | 40.0 |
| MLH1_h(265-311) | 35.7 | 22.8 |
| MLH1_h(298-341) | 38.4 | 24.5 |

[0173] TABLE 5
Functional analysis of amino acid substitutions
in hybrid human-yeast MLH1 genes

| | | |
|---|---|---|
| | Mutation | |
| Experiment/Gene | frequency × 10⁻⁵ | Mutation defect |

Experiment #1

| | | |
|---|---|---|
| None (pMETc) | 274 | 12 |
| MLH1_h(1-86) | 23.3 | 1.0 |
| MLH1_h(1-86) A29S | 33.0 | 1.4 |
| MLH1_h(1-86) I32V | 32.6 | 1.4 |

Experiment #2

| | | |
|---|---|---|
| None (pMETc) | 234 | 8.4 |
| MLH1_h(41-86) | 27.8 | 1.0 |
| MLH1_h(41-86) G67E | 153* | 5.5 |

Experiment #3

| | | |
|---|---|---|
| None (pMETc) | 182 | 16 |
| MLH1_h(77-134) | 11.5 | 1.0 |
| MLH1_h(77-134) N35S | 214** | 19 |
| MLH1_h(77-134) C77R | 290** | 25 |

Experiment #4

| | | |
|---|---|---|
| None (pMETc) | 419 | 64 |
| MLH1_h(77-177) | 6.6 | 1.0 |
| MLH1_h(77-177) A128P | 228* | 35 |
| MLH1_h(77-177) A160V | 5.9 | 0.9 |

Mutation frequencies, mutation defects and statistical comparisons were determined as described in Example 3. Values are from four independent experiments.
**denotes significantly greater than the appropriate control hybrid MLH1 gene and significantly greater or not different than “None”.
*denotes significantly greater than the appropriate control hybrid MLH1 gene and significantly less than “None”.

[0174] TABLE 6
MSH2 variants examined and oligonucleotides used for making site-directed mutations

| | | Source of | Equivalent | | Restriction |
|---|---|---|---|---|---|
| Gene product | | human variant | substitution | Oligonucleotides used^{e} | site |
| and variant amino acid | | (Reference)^{a,b,c,d} | in yMSH2 | [(s), sense and (a), anti-sense strand] | alteration^{f} |
| hMSH2 | T44M | (HGMD) | T44M | SEQ ID NO: 258 (s) | None^{g} |
| | | | | SEQ ID NO: 259 (a) | |
| | Q61P | (ICG) | Q61P | SEQ ID NO: 168 (s) | −DraI |
| | | | | SEQ ID NO: 169 (a) | |
| | N127S | (ICG) | N123S | SEQ ID NO: 170 (s) | +BamHI |
| | | | | SEQ ID NO: 171 (a) | |
| | D167H | (HGMD) | D163H | SEQ ID NO: 172 (s) | +BtgI |
| | | | | SEQ ID NO: 173 (a) | |
| | N186S | (Samowitz, 2001) | N182S | SEQ ID NO: 47 (s) | +XbaI |
| | | | | SEQ ID NO: 48 (a) | |
| | E198G | (ICG) | E194G | SEQ ID NO: 174 (s) | −BsgI |
| | | | | SEQ ID NO: 175 (a) | |
| | C199R | (ICG) | C195R | SEQ ID NO: 176 (s) | −BsgI |
| | | | | SEQ ID NO: 177 (a) | |
| | A272V | (Syngal, 1999) | A267V | SEQ ID NO: 178 (s) | −NsiI |
| | | | | SEQ ID NO: 179 (a) | |
| | S323C | (HGMD) | S318C | SEQ ID NO: 260 (s) | None^{g} |
| | | | | SEQ ID NO: 261 (a) | |
| | C333R | (ICG) | C345R | SEQ ID NO: 49 (s) | +BsaMI |
| | | | | SEQ ID NO: 50 (a) | |
| | C333Y | (ICG) | C345Y | SEQ ID NO: 51 (s) | +BsaMI |
| | | | | SEQ ID NO: 52 (a) | |
| | L390F | (HGMD) | L402F | SEQ ID NO: 180 (s) | +BstBI |
| | | | | SEQ ID NO: 181 (a) | |
| | L390V | (Guerrette, 1998) | L402V | SEQ ID NO: 182 (s) | +BstBI |
| | | | | SEQ ID NO: 183 (a) | |
| | L503P | (ICG) | L521P | SEQ ID NO: 184 (s) | −BglII |
| | | | | SEQ ID NO: 185 (a) | |
| | A609V | (Holinski-Feder, 2001) | A627V | SEQ ID NO: 53 (s) | +BsrGI |
| | | | | SEQ ID NO: 54 (a) | |
| | H639R | (HGMD) | H658R | SEQ ID NO: 55 (s) | +AatII |
| | | | | SEQ ID NO: 56 (a) | |
| | G683R | (Samowitz, 2001) | G702R | SEQ ID NO: 186 (s) | +EcoRV |
| | | | | SEQ ID NO: 187 (a) | |
| | G683V | (Samowitz, 2001) | G702V | SEQ ID NO: 188 (s) | +EcoRV |
| | | | | SEQ ID NO: 189 (a) | |
| | M688I | (HGMD) | M707I | SEQ ID NO: 190 (s) | +VspI |
| | | | | SEQ ID NO: 191 (a) | |
| | I691T | (Samowitz, 2001) | I710T | SEQ ID NO: 57 (s) | +AgeI |
| | | | | SEQ ID NO: 58 (a) | |
| | G692R | (HGMD) | G711R | SEQ ID NO: 59 (s) | +MspA1 |
| | | | | SEQ ID NO: 60 (a) | |
| | C697R | (HGMD) | C716R | SEQ ID NO: 61 (s) | +XhoI |
| | | | | SEQ ID NO: 62 (a) | |
| | I735V | (egSNP) | I754V | SEQ ID NO: 192 (s) | +AflII |
| | | | | SEQ ID NO: 193 (a) | |
| | G751R | (ICG) | G770R | SEQ ID NO: 63 (s) | +SacI |
| | | | | SEQ ID NO: 64 (a) | • |
| | I770V | (Swiss Prot) | I789V | SEQ ID NO: 65 (s) | +NruI |
| | | | | SEQ ID NO: 66 (a) | |
| | K845E | (HGMD) | K873E | SEQ ID NO: 194 (s) | +EaeI |
| | | | | SEQ ID NO: 195 (a) | |
| MSH2_h | A636P | (ICG) | — | SEQ ID NO: 67 (s) | +XbaI |
| (621-739) | | | | SEQ ID NO: 68 (a) | |
| | E647K | (HGMD) | — | SEQ ID NO: 69 (s) | None^{g} |
| | | | | SEQ ID NO: 70 (a) | |
| | Y656H | (Nakahara, 1997) | — | SEQ ID NO: 71 (s) | +AatII |
| | | | | SEQ ID NO: 72 (a) | |
| | M729V | (Nakahara, 1997) | — | SEQ ID NO: 73 (s) | +EaeI |
| | | | | SEQ ID NO: 74 (a) | |

^{a}HGMD, variant reported on-line in the Human Gene Mutation Database (http://uwcmmlls.uwcm.ac.uk)
^{b}ICG, variant reported on-line in the database of the International Collaborative Group on Hereditary Nonpolyposis Colorectal Cancer (http://www.nfdht.nl)
^{c}egSnP, variant reported on-line in the egSnP database (http://www.dir-apps.niehs.nih.gov/egsnp/home.htm)
^{d}Swiss-Prot, variant reported on-line in the Swiss-Prot database (http://us.expasy.org)
^{e}Sense and antisense oligonucleotides were used for making site-directed mutations in the indicated MMR genes as described in Example 4.
^{f}The restriction site alterations are silent at the amino acid sequence level, except for the indicated substitution. +, restriction site additon; −, restriction site loss.
^{g}Alteration screened by DNA sequencing.

[0175] TABLE 6a
Additional MLH1 and MSH2 variants examined and oligonucleotides
used for making site-directed mutations

| | | Source of | Equivalent | | Restriction |
|---|---|---|---|---|---|
| Gene product | | human variant | substitution | Oligonucleotides used^{c} | site |
| and variant amino acid | | (Reference)^{a,b} | in yMSH2 | [(s), sense and (a), anti-sense strand] | alteration^{d} |
| hMLH1 | G22A | (Woods, 2003) | G19A | SEQ ID NO: 538 (s) | +PvuII |
| | | | | SEQ ID NO: 539 (a) | |
| | P141R | (Giraldo, 2003) | P138R | SEQ ID NO: 540 (s) | +MluI |
| | | | | SEQ ID NO: 541 (a) | |
| | K286Q | (Beck, 1997) | K286Q | SEQ ID NO: 542 (s) | +Bsu36I |
| | | | | SEQ ID NO: 543 (a) | |
| | D304V | (HGMD) | D304V | SEQ ID NO: 44 (s) | +EagI |
| | | | | SEQ ID NO: 545 (a) | |
| | P640S | (Giraldo, 2003) | P653S | SEQ ID NO: 546 (s) | +BlpI |
| | | | | SEQ ID NO: 547 (a) | |
| hMSH2 | P30L | (Nafa, 2003) | P30L | SEQ ID NO: 548 (s) | +HindIII |
| | | | | SEQ ID NO: 549 (a) | |
| | VE100/101del | (ICG) | VE106/107del | SEQ ID NO: 550 (s) | +BglII |
| | | | | SEQ ID NO: 551 (a) | |
| | C199W | (Nafa, 2003) | C195W | SEQ ID NO: 552 (s) | −BsgI |
| | | | | SEQ ID NO: 553 (a) | |
| | G322V | (Otway, 2000) | G317V | SEQ ID NO: 554 (s) | None^{e} |
| | | | | SEQ ID NO: 555 (a) | |
| | G338R | (ICG) | G350R | SEQ ID NO: 556 (s) | +XhoI |
| | | | | SEQ ID NO: 557 (a) | |
| | P349L | (Nafa, 2003) | P361L | SEQ ID NO: 558 (s) | +PvuII |
| | | | | SEQ ID NO: 559 (a) | |
| | P439-del | (Jeong, 2003) | P456-del | SEQ ID NO: 560 (s) | +AflII |
| | | | | SEQ ID NO: 561 (a) | |
| | L440P | (ICG) | L457P | SEQ ID NO: 562 (s) | None^{e} |
| | | | | SEQ ID NO: 563 (a) | |
| | R534C | (Gorlov, 2003) | R552C | SEQ ID NO: 564 (s) | +SacI |
| | | | | SEQ ID NO: 565 (a) | |
| | E562V | (HGMD) | E580V | SEQ ID NO: 566 (s) | +NruI |
| | | | | SEQ ID NO: 567 (a) | |
| | N583S | (Wagner, 2003) | N601S | SEQ ID NO: 568 (s) | +ClaI |
| | | | | SEQ ID NO: 569 (a) | |
| | L595R | (Nafa, 2003) | L613R | SEQ ID NO: 570 (s) | +BglII |
| | | | | SEQ ID NO: 571 (a) | |
| | D603N | (ICG) | D621N | SEQ ID NO: 572 (s) | +BsrDI |
| | | | | SEQ ID NO: 573 (a) | |
| | P622T | (ICG) | P640T | SEQ ID NO: 574 (s) | +BstBI |
| | | | | SEQ ID NO: 575 (a) | |
| | V722I | (Gorlov, 2003) | V741I | SEQ ID NO: 576 (s) | +EcoRI |
| | | | | SEQ ID NO: 577 (a) | |

^{a}HGMD, variant reported on-line in the Human Gene Mutation Database (http://www.hgmd.org)
^{b}ICG, variant reported on-line in the database of the International Collaborative Group on Hereditary Nonpolyposis Colorectal Cancer (http://www.nfdht.nl)
^{c}Sense and antisense oligonucleotides were used for making site-directed mutations in the indicated MMR genes as described in Example 4.
^{d}The restriction site alterations are silent at the amino acid sequence level, except for the indicated substitution. +, restriction site additon; −, restriction site loss.
^{e}Alteration screened by DNA sequencing.

[0176] TABLE 7
The functional consequence of amino acid substitutions in yeast MSH2p

| | (GT)₁₆G::URA3 | | CAN1 | |
|---|---|---|---|---|
| | Mutation | Relative | Mutation | Relative |
| | frequency × 10⁻⁵ | mutation defect | frequency × 10⁻⁷ | mutation defect |
| MSH2 Variant | (95% CI) | (range) | (95% CI) | (range) |
| None | 350 (270-430) | 88 (68-108) | 270 (230-320) | 28 (23-33) |
| MSH2 wildtype | 4.0 (2.1-5.9) | 1.0 (0.5-1.5) | 9.8 (7.4-12) | 1.0 (0.8-1.2) |
| P30L | 4.1 | 1.0 | 21 | 2.1 |
| T44M | 4.9 | 1.2 | 6.7 | 0.7 |
| Q61P | 5.4 | 1.4 | 11 | 1.1 |
| VE-106/107-del | 274* | 68 | 172 | 18 |
| N123S | 3.0 | 0.8 | 5.4 | 0.6 |
| D163H | 3.2 | 0.8 | 4.4 | 0.4 |
| N182S | 2.9 | 0.7 | 12 | 1.2 |
| E194G | 50* | 13 | 12 | 1.2 |
| C195R | 280** | 70 | 360 | 37 |
| C195W | 1.8 | 0.4 | 8.3 | 0.8 |
| A267V | 4.7* | 1.2 | 7.4 | 0.8 |
| G317V | 1.8 | 0.4 | 22 | 2.2 |
| S318C | 6.3 | 1.6 | 6.5 | 0.7 |
| C345R | 9.7* | 2.4 | 21 | 2.1 |
| C345Y | 8.0 | 2.0 | 18 | 1.8 |
| G350R | 336** | 84 | 319 | 32 |
| P361L | 2.6 | 0.6 | 17 | 1.8 |
| L402F | 0.6 | 0.2 | 6.6 | 0.7 |
| L402V | 0.9 | 0.2 | 9.9 | 1.0 |
| P456-del | 85.8* | 21 | 14 | 1.4 |
| L457P | 138* | 34 | 55 | 5.6 |
| L521P | 0.9 | 0.2 | 140 | 14 |
| R552C | 11.5* | 2.9 | 35 | 3.6 |
| E580V | 3.5 | 0.9 | 8.2 | 0.8 |
| N601S | 2.8 | 0.7 | 4.6 | 0.5 |
| L613R | 6.7* | 1.7 | 8.4 | 0.8 |
| D621N | 21.3* | 5.3 | 11 | 1.2 |
| A627V | 3.9 | 1.0 | 17 | 1.7 |
| P640T | 9.8* | 2.4 | 11.9 | 1.2 |
| H658R | 410** | 103 | 270 | 28 |
| G702R | 410** | 103 | 220 | 22 |
| G702V | 2.4 | 0.6 | 11 | 1.1 |
| M707I | 3.4 | 0.9 | 7.2 | 0.7 |
| I710T | 1.9 | 0.5 | 17 | 1.7 |
| G711R | 280* | 70 | 320 | 33 |
| C716R | 350** | 88 | 440 | 45 |
| V741I | 3.4 | 0.8 | 18 | 1.8 |
| I754V | 4.1 | 1.0 | 6.8 | 0.7 |
| G770R | 350** | 88 | 350 | 36 |
| I789V | 2.8 | 0.7 | 14 | 1.4 |
| K873E | 1.4 | 0.4 | 5.3 | 0.5 |

Mutation frequencies, 95% confidence intervals (CI), mutation defects and statistical comparisons were determined as described in Example 3. Mean mutation frequencies for the (GT)₁₆G::URA3 reporter gene are from six independent experiments.
**denotes signficantly greater than wild-type MSH2 and significantly greater or not different than “None” (i.e., inactivating mutation).
*denotes signficantly greater than wild-type MSH2 and significantly less than “None” (i.e., efficiency polymorphism). These conclusions were based on comparisons to control values within each independent experiment. Median mutation frequencies for the CAN1-based fluctuation test are from seven independent experiments.

[0177] TABLE 8
Functional analysis of human-yeast hybrid MSH2 genes
and hybrid MSH2 genes containing codon alterations

| | | |
|---|---|---|
| | Mutation | Relative |
| Gene | frequency × 10⁻⁵ | mutation defect |

Experiment #1

| | | |
|---|---|---|
| None (pMETc vector) | 328 | 199 |
| MSH2 | 1.6 | 1.0 |
| MSH2_h(1-63) | 245 | 148 |
| MSH2_h(621-832) | 228 | 138 |
| MSH2_h(621-739) | 3.2 | 1.9 |
| MSH2_h(730-832) | 245 | 148 |

Experiment #2

| | | |
|---|---|---|
| None (pMETc vector) | 424 | 230 |
| MSH2 | 1.8 | 1.0 |
| MSH2_h(621-832) | 155 | 84 |
| MSH2_h(621-832)ins9 | 22 | 12 |
| MSH2_h(730-832) | 369 | 201 |
| MSH2_h(730-832)ins9 | 18 | 10 |

Experiment #3

| | | |
|---|---|---|
| None (pMETc vector) | 258 | 30 |
| MSH2_h(621-739) | 8.5 | 1.0 |
| MSH2_h(621-739) A636P | 239** | 28 |
| MSH2_h(621-739) E647K | 8.9 | 1.0 |
| MSH2_h(621-739) Y656H | 5.5 | 0.6 |
| MSH2_h(621-739) M729V | 12 | 1.4 |

Mutation frequencies, mutation defects and statistical comparisons were determined as described in Example 1.
**denotes significantly greater than MSH2_h(621-739) and not signficantly different than “None” (i.e. inactivating mutation) based on comparisons within this experiment.

[0178] TABLE 9
Colorimetric analysis of yeast strains YBT39, YBT40 and YBT41

| Strain | Expression vector | White colonies | Pink colonies |
|---|---|---|---|
| YBT39 | pMETc | 25-50% | 50-75% |
| YBT39 | pMETc/MSH2 | 100% | 0% |
| YBT40 | pMETc | 40-60% | 30-40% |
| YBT40 | pMLH1 | 100% | 0% |
| YBT41 | pMETc | 25-50% | 50-75% |
| YBT41 | pMLH1 | 100% | 0% |

[0179] TABLE 10
Functional analysis of human-yeast hybrid MLH1 genes

| | ADE2::MS3::ADE2^{a} | | | | CAN1^{b} | (GT)₁₆G::URA3^{c} |
|---|---|---|---|---|---|---|
| | Total | Sectored CFU | | White CFU | Mutation frequency | Mutation frequency |
| MLH1 gene | CFU | (% of total) | | (% of total) | (mutation defect) | (mutation defect) |
| None | 1226 | 1224 | (>95%) | 2 (<5%) | 3.1 × 10⁻⁵ (44) | 1.9 × 10⁻³ (75) |
| MLH1 | 452 | 2 | (<2%) | 450 (>98%) | 7.1 × 10⁻⁷ (1) | 2.5 × 10⁻⁵ (1) |
| MLH1_h(41-86) | 180 | 26 | (14) | 154 (86%) | 2.8 × 10⁻⁶ (4.0) | 1.2 × 10⁻⁴ (4.8) |
| MLH1_h(77-134) | 515 | 3 | (<2%) | 512 (>98%) | 1.7 × 10⁻⁶ (2.4) | 5.4 × 10⁻⁵ (2.1) |
| ^{a}Yeast strain YBT41, which contains an MLH1 deletion and the ADE2::MS3::ADE2 allele, was transformed with expression vectors carrying the indicated MLH1 gene or the parental expression | | | | | | |
| # vector pMETc lacking an MLH1 gene (“None”) and cells were plated on SD medium lacking histidine and containing 4 μg/ml adenine. Colonies (CFU), which are transformants since they grow | | | | | | |
| # without added histidine, were counted and visually inspected for red-white sectoring. In all transformations a | | | | | | |
| # background of ≈10% red colonies was consistently observed (see FIG. 1B) and these colonies were excluded from our analysis. The origin of these colonies are | | | | | | |
| # presumably host cells in which the ADE2 gene had mutated prior to, or shortly after, the transformation. | | | | | | |
| ^{b}Mutation frequencies were based on forward mutation to canavanine resistance and were determined for the MLH1-deletion strain YBT24 harboring the | | | | | | |
| # indicated MLH1 gene or the parental expression vector pMETc (“None”). The median value of 9 independent cultures is shown. Mutation defects were calculated with respect to the mutation frequency conferred by the wild-type MLH1 gene. | | | | | | |

^{c}Mutation frequencies were determined using a URA3 reporter gene preceded by an in-frame (GT)₁₆G microsatellite. Values are from Ellison et al. (2001).

[0180] TABLE 11
Termination codons identified in hybrid human-yeast MLH1 genes

| | MLH1 codon | | | | | |
|---|---|---|---|---|---|---|
| | (species/region | | Screening | Codon | | Number of times |
| Hybrid gene | of hybrid)^{a} | | method^{b} | alteration | Consequence | isolated |
| MLH1_h(41-86) | 34 | (yeast) | a | GAG→TAG | E34-Term | 1 |
| | 52 | (human) | a, b, b | AAA→TAA | K52-Term | 3 |
| | 53 | (human) | b, b | GAG→TAG | E53-Term | 2 |
| | 57 | (human) | a | AAG→TAG | K57-Term | 1 |
| | 71 | (human) | a | GAA→TAA | E71-Term | 1 |
| | 77 | (human) | b | TGT→TGA | C77-Term | 1 |
| | 120 | (yeast) | a | AGA→TGA | R120-Term | 1 |
| | 142 | (yeast) | a | AAA→TAA | K142-Term | 1 |
| MLH1_h(77-134) | 77 | (human) | a | CGA→TGA | C77-Term | 1 |
| | 91 | (human) | a | TTA→TAA | L91-Term | 1 |
| | 97 | (human) | a | TAT→TAA | Y97-Term | 1 |
| | 100 | (human) | a | CGA→TGA | R100-Term | 1 |
| | 104 | (human) | a | TTG→TAG | L104-Term | 1 |

^{a}Codon numbering is relative to the yeast or human portion of the hybrid MLH1 proteins as depicted in FIG. 3B.
^{b}Prospective screening methods utilized yeast strain YBT24 for qualitative patch assays (“a”) or YBT41 for a colorimetric assay (“b”) as described in the Materials and Methods section.

[0181] TABLE 12
MLH1 missense mutations identified in human-yeast hybrid MLH1_h(41-86)

| | | | | | | |
|---|---|---|---|---|---|---|
| MLH1 gene or | Screening | Missense | | Corresponding | Mutation | |
| variant codon # | method^{a} | mutation | Consequence | human residue | defect^{b} | SEQ ID NO.s |

Yeast codon:

| | | | | | | |
|---|---|---|---|---|---|---|
| 8 | a | CTT→CAC | L8H | L11 | ++ | SEQ ID NO: 408 |
| 16 | a | ATT→TTT | I16F | I19 | ++ | SEQ ID NO: 409 |
| 26 | a | GTA→ATA | V26I | A29 | ++ | SEQ ID NO: 410 |
| 35 | a | AAT→GAT | N35D | N38 | +++ | SEQ ID NO: 411 |
| | a | AAT→ACT | N35T | N38 | ++ | SEQ ID NO: 412 |
| 37 | a, a | ATC→ACC | I37T | L40 | +++ | SEQ ID NO: 413 |
| | b | ATC→AAC | I37N | L40 | +++ | SEQ ID NO: 414 |

Human codon:

| | | | | | | |
|---|---|---|---|---|---|---|
| 41 | a | GAT→GGT | D41G | — | ++ | SEQ ID NO: 415 |
| 42 | a | GCA→ACA | A42T | — | +++ | SEQ ID NO: 416 |
| | b | GCA→GAA | A42E | — | +++ | SEQ ID NO: 417 |
| | b | GCA→GTA | A42V^{c} | — | +++ | SEQ ID NO: 418 |
| 44 | a | TCC→TTC | S44F | — | +++ | SEQ ID NO: 419 |
| 45 | a, b | ACA→ATA | T45I | — | +++ | SEQ ID NO: 420 |
| 46 | a | AGT→ACT | S46T | — | ++ | SEQ ID NO: 421 |
| 47 | b | ATT→ACT | I47T | — | ++ | SEQ ID NO: 422 |
| | a | ATT→AGT | I47S | — | +++ | SEQ ID NO: 423 |
| 48 | a | CAA→TAT | Q48Y | — | +++ | SEQ ID NO: 424 |
| 49 | b | GTG→GAG | V49E | — | ++ | SEQ ID NO: 425 |
| | a | GTG→ATG | V49M | — | ++ | SEQ ID NO: 426 |
| | a | GTG→GCG | V49A | — | +++ | SEQ ID NO: 427 |
| 51 | a, b | GTT→GAT | V51D | — | ++ | SEQ ID NO: 428 |
| | a | GTT→GCT | V51A | — | ++ | SEQ ID NO: 429 |
| 52 | a, a, b | AAA→ATA | K52I | — | + | SEQ ID NO: 430 |
| 53 | a, a, b | GAG→GTG | E53V | — | ++ | SEQ ID NO: 431 |
| 54 | a | GGA→AGA | G54R | — | + | SEQ ID NO: 432 |
| 55 | a, a, b | GGC→GAC | G55D | — | + | SEQ ID NO: 433 |
| | a | GGC→AGC | G55S | — | ++ | SEQ ID NO: 434 |
| 56 | a | CTG→ATG | L56M | — | + | SEQ ID NO: 435 |
| | a | CTG→CCG | L56P | — | +++ | SEQ ID NO: 436 |
| 57 | a | AAG→GAG | K57E^{c} | — | + | SEQ ID NO: 437 |
| | b | AAG→AAC | K57N | — | +++ | SEQ ID NO: 438 |
| 59 | b | ATT→AAT | I59N | — | +++ | SEQ ID NO: 439 |
| | a, a | ATT→TTT | I59F | — | +++ | SEQ ID NO: 440 |
| | a | ATT→ACT | I59T | — | +++ | SEQ ID NO: 441 |
| 60 | a | CAG→CCG | Q60P | — | ++ | SEQ ID NO: 442 |
| 61 | a | ATC→AAC | I61N | — | ++ | SEQ ID NO: 443 |
| 63 | a | GAC→TAC | D63Y | — | +++ | SEQ ID NO: 444 |
| 64 | b | AAT→ATT | N64I | — | ++ | SEQ ID NO: 445 |
| 65 | b | GGC→GTC | G65V | — | +++ | SEQ ID NO: 446 |
| | a | GGC→GCC | G65A | — | +++ | SEQ ID NO: 447 |
| | a | GGC→GAC | G65D | — | ++ | SEQ ID NO: 448 |
| | a | GGC→AGC | G65S | — | ++ | SEQ ID NO: 449 |
| 67 | a, a, b | GGG→GAG | G67E | — | ++ | SEQ ID NO: 450 |
| | a | GGG→GTG | G67V | — | +++ | SEQ ID NO: 451 |
| 68 | a | ATC→AAC | I68N | — | +++ | SEQ ID NO: 452 |
| | a, b | ATC→TTC | I68F | — | ++ | SEQ ID NO: 453 |
| | b | ATC→AGC | I68S^{c} | — | ++ | SEQ ID NO: 454 |
| 70 | a | AAA→AAT | K70N | — | +++ | SEQ ID NO: 455 |
| | a | AAA→ATA | K70I | — | +++ | SEQ ID NO: 456 |
| 72 | a, b | GAT→GGT | D72G | — | ++ | SEQ ID NO: 457 |
| | a, b | GAT→GTT | D72V | — | + | SEQ ID NO: 458 |
| 73 | b | CTG→ATG | L73M | — | ++ | SEQ ID NO: 459 |
| | a | CTG→CCG | L73P | — | ++ | SEQ ID NO: 460 |
| | a | CTG→CAG | L73Q | — | ++ | SEQ ID NO: 461 |
| 76 | b | GTA→GAA | V76E | — | +++ | SEQ ID NO: 462 |
| 77 | a | TGT→GGT | C77G | — | ++ | SEQ ID NO: 463 |
| | b | TGT→TCT | C77S | — | ++ | SEQ ID NO: 464 |
| 79 | b | AGG→TGG | R79W^{c} | — | ++ | SEQ ID NO: 465 |
| 80 | a | TTC→TCC | F80S^{c} | — | ++ | SEQ ID NO: 466 |
| | b | TTC→CTC | F80L | — | +++ | SEQ ID NO: 467 |
| | b | TTC→ATC | F80I | — | +++ | SEQ ID NO: 468 |
| 81 | a | ACG→ATG | T81M | — | + | SEQ ID NO: 469 |
| 82 | a, a | ACG→TCG | T82S | — | + | SEQ ID NO: 470 |
| | a, b | ACG→AAG | T82K | — | +++ | SEQ ID NO: 471 |
| | a | ACG→ATG | T82M | — | +++ | SEQ ID NO: 472 |
| 83 | a, b | TCC→CCC | S83P | — | ++ | SEQ ID NO: 473 |
| | a | TCC→TTC | S83F | — | +++ | SEQ ID NO: 474 |
| 84 | a | AAA→GAA | K84R | — | ++ | SEQ ID NO: 475 |
| | a | AAA→AGA | K84E | — | ++ | SEQ ID NO: 476 |
| 85 | a | TTA→TCA | L85S | — | ++ | SEQ ID NO: 477 |

Yeast codon:

| 86 | a | GAA→GGA | E86G^{c} | E89 | ++ | SEQ ID NO: 478 |
|---|---|---|---|---|---|---|
| 88 | a | TTG→GTG | L88V | L91 | ++ | SEQ ID NO: 479 |
| 99 | b | GAA→GGA | E99G | E102 | ++ | SEQ ID NO: 480 |
| 108 | a | GCA→CCA | A108P | A111 | +++ | SEQ ID NO: 481 |
| 110 | a | GTC→GCC | V110A^{c} | V113 | +++ | SEQ ID NO: 482 |
| 112 | b | GTA→GAA | V112E | I115 | ++ | SEQ ID NO: 483 |
| 113 | b | ACG→GCG | T113A | T116 | ++ | SEQ ID NO: 484 |
| 144 | a | GGT→AGT | G144S | G147 | +++ | SEQ ID NO: 485 |
| ^{a}MMR-deficient transformants were identified by (“a”) qualitative patch assays using YBT24 or (“b”) colorimetric assay using YBT41 as described in Example 8. | | | | | | |
| ^{b}Yeast strain YBT24 containing pSH91 was transformed with pMLH1_h(41-86) containing the indicated missense mutations. Mutation frequencies were determined using a standardized MMR assay based on instability of the GT-tract in pSH91 (Example 1). To calculate the mutation defect, the mean mutation frequency confered by each variant was divided by the mutation frequency confered by the parental MLH1_h(41-86) | | | | | | |
| # gene. +, Mutation defect of 2.1 to 3.9 (18-33% loss-of-MMR function relative to the mutation frequency of the MLH1-null strain YBT24); ++, Mutation defect of | | | | | | |
| # 4.0 to 7.6 (34-66% loss-of-MMR function); +++, Mutation defect of 7.8 or greater (≧67% loss-of-MMR function). The mean mutation frequency confered by pMLH1_h(41-86) was 2.7 × 10⁻⁴ (Range: 1.1-4.4 × 10⁻⁴) The mean mutation frequency confered by the empty expression vector pMETc was 3.2 × 10⁻³ (Range: 1.9-7.0 × 10⁻³)(Mutation defect = 11.7). | | | | | | |

^{c}In addition to the indicated missense mutation the following silent alterations were observed (mutation/silent alteration): A42V/F85F; K57E/T45T; I68S/I47I and 175I; R79W/D143D; F80S/L73L; E86G/T82T and K142K; V110A/T66T.

[0182] TABLE 13
MLH1 missense mutations identified in human-yeast hybrid MLH1_h(77-134)

| | | | | | | |
|---|---|---|---|---|---|---|
| MLH1 gene or | Screening | Missense | | Corresponding human | Mutation | |
| variant codon # | method^{*} | mutation | Consequence | residue | defect^{b} | SEQ ID NO. s |

Yeast codon:

| | | | | | | |
|---|---|---|---|---|---|---|
| 30 | a | AAA→AAT | K30N | K33 | +++ | SEQ ID NO: 486 |
| 35 | a | AAT→AGT | N35S | N38 | +++ | SEQ ID NO: 487 |
| 37 | a | ATC→TTC | I37F | L40 | ++ | SEQ ID NO: 488 |
| | a | ATC→ACC | I37T | L40 | +++ | SEQ ID NO: 489 |
| 38 | a, a, b | GAT→GGT | D38G | D41 | +++ | SEQ ID NO: 490 |
| | b | GAT→GAA | D38E | D41 | +++ | SEQ ID NO: 491 |
| | b | GAT→ATT | D38N | D41 | +++ | SEQ ID NO: 492 |
| 40 | b | AAT→ATT | N40I^{c} | K43 | +++ | SEQ ID NO: 493 |
| 41 | a, a | GCT→GTT | A41V | S44 | ++ | SEQ ID NO: 494 |
| 42 | a | ACA→ATA | T42I | T45 | +++ | SEQ ID NO: 495 |
| 45 | b | GAT→GGT | D45G | Q48 | + | SEQ ID NO: 496 |
| 46 | b | ATT→AAT | I46N | V49 | +++ | SEQ ID NO: 497 |
| 49 | a | AAG→GAG | K49E | K52 | ++ | SEQ ID NO: 498 |
| 50 | a | GAA→GTA | E50V | E53 | + | SEQ ID NO: 499 |
| 52 | a, a | GGA→AGA | G52R | G55 | + | SEQ ID NO: 500 |
| 56 | b | CTT→CAT | L56H | I59 | +++ | SEQ ID NO: 501 |
| 58 | a, b | ATA→AAA | I58K | I61 | +++ | SEQ ID NO: 502 |
| 60 | a | GAT→GGT | D60G | D63 | ++ | SEQ ID NO: 503 |
| 61 | b | AAC→AGC | N61S | N64 | +++ | SEQ ID NO: 504 |
| 62 | a, b | GGA→GAA | G62E | G65 | +++ | SEQ ID NO: 505 |
| | a, a | GGA→AGA | G62R | G65 | ++ | SEQ ID NO: 506 |
| 65 | a | ATT→AAT | I65N | I68 | +++ | SEQ ID NO: 507 |
| 71 | a | CCA→CTA | P71L | D74 | ++ | SEQ ID NO: 508 |

Human codon:

| | | | | | | |
|---|---|---|---|---|---|---|
| 77 | a | TGT→CGT | C77R | — | ++ | SEQ ID NO: 509 |
| 78 | a | GAG→GTG | E78V | — | ++ | SEQ ID NO: 510 |
| 80 | a, a | TTC→CTC^{d} | F80L^{c} | — | +++ | SEQ ID NO: 511 |
| 89 | a | GAG→GTG | E89V | — | + | SEQ ID NO: 512 |
| 99 | a | TTT→ATT | F99I | — | +++ | SEQ ID NO: 513 |
| 99 | a | TTT→CTT | F99L | — | ++ | SEQ ID NO: 514 |
| 100 | b | CGA→CAA | R100Q | — | ++ | SEQ ID NO: 515 |
| 101 | a | GGT→GAT | G101D^{c} | — | +++ | SEQ ID NO: 516 |
| 103 | a | GCT→GTT | A103V | — | ++ | SEQ ID NO: 517 |
| | a, b | GCT→ACT | A103T | — | ++ | SEQ ID NO: 518 |
| | a | GCT→CCT | A103P | — | ++ | SEQ ID NO: 519 |
| 111 | a | GCT→ACT | A111T | — | +++ | SEQ ID NO: 520 |
| 114 | a | ACT→ATT | T114I | — | ++ | SEQ ID NO: 521 |
| 115 | b | ATT→AGT | I115S^{c} | — | +++ | SEQ ID NO: 522 |
| | b | ATT→AAT | I115N | — | +++ | SEQ ID NO: 523 |
| | b | ATT→TTT | 1115F | — | ++ | SEQ ID NO: 524 |
| 116 | a | ACA→TCA | T116S | — | + | SEQ ID NO: 525 |
| 118 | b | AAA→AAT | K118N | — | +++ | SEQ ID NO: 526 |
| | a | AAA→ATA | K118I | — | + | SEQ ID NO: 527 |
| 133 | a | GGA→GAA | G133E | — | ++ | SEQ ID NO: 528 |

Yeast codon:

| 136 | a | CCC→CAC | P136H | P139 | + | SEQ ID NO: 529 |
|---|---|---|---|---|---|---|
| 140 | a | GCT→GTT | A140V | A143 | ++ | SEQ ID NO: 530 |
| 144 | a | GGT→AGT | G144S | G147 | ++ | SEQ ID NO: 531 |
| ^{a}MMR-deficient transformants were identified by (“a”) qualitative patch assays using YBT24 or (“b”) colorimetric assay using YBT41 as described in Example 8. | | | | | | |
| ^{b}Yeast strain YBT24 containing pSH91 was transformed with pMLH1_h(77-134) containing the indicated missense mutations. Mutation frequencies were determined | | | | | | |
| # using a standardized MMR assay based on instability of | | | | | | |
| # the GT-tract in pSH91 (Example 1). To calculate the mutation defect, the mean mutation frequency confered by each variant was divided by the mutation frequency confered by | | | | | | |
| # the parental MLH1_h(77-134) gene. +, Mutation defect of 2.5 | | | | | | |
| # to 9.0 (9-33% loss-of-MMR function relative to the mutation frequency of the MLH1-null strain YBT24); ++, Mutation defect of 9.1 to 17.9 (34-66% loss-of-MMR | | | | | | |
| # function); +++, Mutation defect of 18.0 or greater (≧67% loss-of-MMR function). The mean mutation frequency confered by pMLH1_h(77-134) was 1.2 × 10⁻⁴ (Range: 0.6-2.4 × 10⁻⁴). The mean | | | | | | |
| # mutation frequency confered by the empty expression vector pMETc was 3.3 × 10⁻³ (Range: 1.8-7.0 × 10⁻³)(Mutation defect = 27.5) | | | | | | |

^{c}In addition to the indicated missense mutation the following silent alterations were observed (mutation/silent alteration): N40I/K134K; F80L/A92A; G101D/K54K; I115S/T116T.
^{d}The missense mutation TTC→TTA was also identified.

[0183] TABLE 14
MLH1 amino acid substitutions conferring little to no loss-of-MMR function^{a}

| | | | | | |
|---|---|---|---|---|---|
| | | | | | Is mutant residue |
| MLH1 gene and | Screening | Missense | | Corresponding | tolerated in other |
| variant codon | method^{b} | mutation | Consequence | human residue | species?^{c} |

MLH1_h(41-86):

| | | | | | | |
|---|---|---|---|---|---|---|
| 62 | (human) | b | CAA→CGA | Q62R | — | yes |
| 64 | (human) | a | AAT→GAT | N64D | — | yes |
| 71 | (human) | a | GAA→GAT | E71D | — | yes |

MLH1_h(77-134):

| 33 | (yeast) | a | ATG→TTG | M33L | I36 | yes |
|---|---|---|---|---|---|---|
| 72 | (yeast) | a | ATC→ACC | I72T | I75 | no |
| 95 | (human) | a | TCT→ACT | S95T | — | no |
| 133 | (yeast) | a | TTG→TCG | L133S | K136 | yes |
| ^{a}Mutation frequencies were measured using the standardized GT-tract instability assay as described in Example 1. Mutation frequencies were: MLH1_h(41-86) | | | | | | |
| # Q62R, 3.6 × 10⁻⁴; MLH1_h(41-86) N64D, 2.1 × 10⁻⁴; MLH1_h(41-86) E71D, 3.2 × 10⁻⁴; MLH1_h(77-134) | | | | | | |
| # M33L, 4.0 × 10⁻⁵; MLH1_h(77-134) I72T, 1.0 × 10⁻⁴; MLH1_h(77-134) S95T, 4.6 × 10⁻⁵; and MLH1_h(77-134) | | | | | | |
| # L133S, 1.5 × 10⁻⁴. These values represent mutation defects of 1.4, 0.8, 1.2, 0.3, 0.9, 0.4, and 1.3, respectively, compared to the appropriate parental hybrid gene. | | | | | | |

^{b}MMR-deficient transformants were identified by qualitative patch assays using YBT24 (“a”) or colorimetric assay using YBT41 (“b”) as described in Example 8.
^{c}As determined from the MLH1p alignment shown in FIG. 6.

1. A diagnostic method, comprising determining whether a human subject has an increased rate of accumulating genetic mutations due to the loss of DNA mismatch repair function associated with any of the following amino acid sequences:
corresponding to human MLH1: 23D (SEQ ID NO: 262), 29I (SEQ ID NO: 263), 38T (SEQ ID NO: 264), 40F (SEQ ID NO: 265), 40N (SEQ ID NO: 266), 40T (SEQ ID NO: 267), 41E (SEQ ID NO: 268), 41G (SEQ ID NO: 269), 41N (SEQ ID NO: 270), 42E (SEQ ID NO: 271), 42T (SEQ ID NO: 272), 42V (SEQ ID NO: 273), 43A (SEQ ID NO: 274), 43D (SEQ ID NO: 275), 43E (SEQ ID NO: 276), 43F (SEQ ID NO: 277), 43H (SEQ ID NO: 278), 43I (SEQ ID NO: 279), 43L (SEQ ID NO: 280), 43M (SEQ ID NO: 281), 43P (SEQ ID NO: 282), 43S (SEQ ID NO: 283), 43T (SEQ ID NO: 284), 43V (SEQ ID NO: 285), 43W (SEQ ID NO: 286), 43Y (SEQ ID NO: 287), 44D (SEQ ID NO: 288), 44G (SEQ ID NO: 289), 44K (SEQ ID NO: 290), 44M (SEQ ID NO: 291), 44N (SEQ ID NO: 292), 45I (SEQ ID NO: 293), 46T (SEQ ID NO: 294), 47S (SEQ ID NO: 295), 47T (SEQ ID NO: 296), 48G (SEQ ID NO: 297), 48Y (SEQ ID NO: 298), 49E (SEQ ID NO: 299), 49M (SEQ ID NO: 300), 49N (SEQ ID NO: 301), 51A (SEQ ID NO: 302), 51D (SEQ ID NO: 303), 55S (SEQ ID NO: 304), 56M (SEQ ID NO: 305), 56P (SEQ ID NO: 306), 57N (SEQ ID NO: 307), 59F (SEQ ID NO: 308), 59H (SEQ ID NO: 309), 59N (SEQ ID NO: 310), 59T (SEQ ID NO: 311), 61N (SEQ ID NO: 312), 63G (SEQ ID NO: 313), 63Y (SEQ ID NO: 314), 64I (SEQ ID NO: 315), 64S (SEQ ID NO: 316), 65A (SEQ ID NO: 317), 65D (SEQ ID NO: 318), 65E (SEQ ID NO: 319), 65S (SEQ ID NO: 320), 65V (SEQ ID NO: 321), 67W (SEQ ID NO: 322), 68F (SEQ ID NO: 323), 68N (SEQ ID NO: 324), 68S (SEQ ID NO: 325), 70I (SEQ ID NO: 326), 70N (SEQ ID NO: 327), 72G (SEQ ID NO: 328), 73M (SEQ ID NO: 329), 73P (SEQ ID NO: 330), 74L (SEQ ID NO: 331), 76E (SEQ ID NO: 332), 77S (SEQ ID NO: 333), 77Y (SEQ ID NO: 334), 79W (SEQ ID NO: 335), 80I (SEQ ID NO: 336), 80S (SEQ ID NO: 337), 80V (SEQ ID NO: 338), 82K (SEQ ID NO: 339), 82M (SEQ ID NO: 340), 82S (SEQ ID NO: 341), 83F (SEQ ID NO: 342), 83P (SEQ ID NO: 343), 89G (SEQ ID NO: 344), 89V (SEQ ID NO: 345), 91V (SEQ ID NO: 346), 99I (SEQ ID NO: 347), 99L (SEQ ID NO: 348), 100P (SEQ ID NO: 349), 100Q (SEQ ID NO: 350), 101D (SEQ ID NO: 351), 102D (SEQ ID NO: 352), 102G (SEQ ID NO: 353), 103T (SEQ ID NO: 354), 103V (SEQ ID NO: 355), 111P (SEQ ID NO: 356), 111T (SEQ ID NO: 357), 113A (SEQ ID NO: 358), 114I (SEQ ID NO: 359), 115E (SEQ ID NO: 360), 115F (SEQ ID NO: 361), 115N (SEQ ID NO: 362), 115S (SEQ ID NO: 363), 116A (SEQ ID NO: 364), 118N (SEQ ID NO: 365), 128P (SEQ ID NO: 366), 182G (SEQ ID NO: 367), 193P (SEQ ID NO: 368), 304V (SEQ ID NO: 601), 542P (SEQ ID NO: 369), 549P (SEQ ID NO: 370), 640S (SEQ ID NO: 602), 663G (SEQ ID NO: 371), 755S (SEQ ID NO: 372), 22A (SEQ ID NO: 598), 29S (SEQ ID NO: 373), 32V (SEQ ID NO: 374), 36L (SEQ ID NO: 375), 43C (SEQ ID NO: 376), 43G (SEQ ID NO: 377), 43N (SEQ ID NO: 378), 43Q (SEQ ID NO: 379), 43R (SEQ ID NO: 380), 62R (SEQ ID NO: 381), 64D (SEQ ID NO: 382), 71D (SEQ ID NO: 383), 75T (SEQ ID NO: 384), 95T (SEQ ID NO: 385), 136S (SEQ ID NO: 386), 141R (SEQ ID NO: 599), 160V (SEQ ID NO: 387), 272V (SEQ ID NO: 388), 286Q (SEQ ID NO: 600), 441T (SEQ ID NO: 389), 648L (SEQ ID NO: 390), and 659Q (SEQ ID NO: 391).
corresponding to human MSH2: 100/101-del (SEQ ID NO: 604), 198G (SEQ ID NO: 392), 199R (SEQ ID NO: 400), 272V (SEQ ID NO: 393), 333R (SEQ ID NO: 90), 338R (SEQ ID NO: 607), 439-del (SEQ ID NO: 609), 440P (SEQ ID NO: 610), 503P (SEQ ID NO: 394), 534C (SEQ ID NO: 611), 595R (SEQ ID NO: 614), 603N (SEQ ID NO: 615), 622T (SEQ ID NO: 616), 636P (SEQ ID NO: 99), 639R (SEQ ID NO: 93), 683R (SEQ ID NO: 395), 692R (SEQ ID NO: 95), 697R (SEQ ID NO: 96), 751R (SEQ ID NO: 97), 30L (SEQ ID NO: 603), 44M (SEQ ID NO: 396), 61P (SEQ ID NO: 397), 127S (SEQ ID NO: 398), 167H (SEQ ID NO: 399), 186S (SEQ ID NO: 89), 199W (SEQ ID NO: 605), 322V (SEQ ID NO: 606), 323C (SEQ ID NO: 401), 333Y (SEQ ID NO: 91), 349L (SEQ ID NO: 608), 390F (SEQ ID NO: 402), 390V (SEQ ID NO: 403), 562V (SEQ ID NO: 612), 583S (SEQ ID NO: 613), 609V (SEQ ID NO: 92), 647K (SEQ ID NO: 100), 656H (SEQ ID NO: 101), 683V (SEQ ID NO: 404), 688I (SEQ ID NO: 405), 691T (SEQ ID NO: 94), 722I (SEQ ID NO: 617), 729V (SEQ ID NO: 102), 735V (SEQ ID NO: 406), 770V (SEQ ID NO: 98), and 845E (SEQ ID NO: 407).

2. The diagnostic method of claim 1 which is used for determining whether a human subject has an increased susceptibility to the development of cancer associated with loss of DNA mismatch repair function, comprising determining whether the subject possesses a gene which encodes a DNA mismatch repair protein having any of the listed amino acid sequences.

3. The diagnostic method of claim 2, wherein the DNA mismatch repair protein exhibits a partial or complete loss of function and has any of the following amino acid sequences:
corresponding to human MLH1: 23D (SEQ ID NO: 262), 29I (SEQ ID NO: 263), 38T (SEQ ID NO: 264), 40F (SEQ ID NO: 265), 40N (SEQ ID NO: 266), 40T (SEQ ID NO: 267), 41E (SEQ ID NO: 268), 41G (SEQ ID NO: 269), 41N (SEQ ID NO: 270), 42E (SEQ ID NO: 271), 42T (SEQ ID NO: 272), 42V (SEQ ID NO: 273), 43A (SEQ ID NO: 274), 43D (SEQ ID NO: 275), 43E (SEQ ID NO: 276), 43F (SEQ ID NO: 277), 43H (SEQ ID NO: 278), 43I (SEQ ID NO: 279), 43L (SEQ ID NO: 280), 43M (SEQ ID NO: 281), 43P (SEQ ID NO: 282), 43S (SEQ ID NO: 283), 43T (SEQ ID NO: 284), 43V (SEQ ID NO: 285), 43W (SEQ ID NO: 286), 43Y (SEQ ID NO: 287), 44D (SEQ ID NO: 288), 44G (SEQ ID NO: 289), 44K (SEQ ID NO: 290), 44M (SEQ ID NO: 291), 44N (SEQ ID NO: 292), 45I (SEQ ID NO: 293), 46T (SEQ ID NO: 294), 47S (SEQ ID NO: 295), 47T (SEQ ID NO: 296), 48G (SEQ ID NO: 297), 48Y (SEQ ID NO: 298), 49E (SEQ ID NO: 299), 49M (SEQ ID NO: 300), 49N (SEQ ID NO: 301), 51A (SEQ ID NO: 302), 51D (SEQ ID NO: 303), 55S (SEQ ID NO: 304), 56M (SEQ ID NO: 305), 56P (SEQ ID NO: 306), 57N (SEQ ID NO: 307), 59F (SEQ ID NO: 308), 59H (SEQ ID NO: 309), 59N (SEQ ID NO: 310), 59T (SEQ ID NO: 311), 61N (SEQ ID NO: 312), 63G (SEQ ID NO: 313), 63Y (SEQ ID NO: 314), 64I (SEQ ID NO: 315), 64S (SEQ ID NO: 316), 65A (SEQ ID NO: 317), 65D (SEQ ID NO: 318), 65E (SEQ ID NO: 319), 65S (SEQ ID NO: 320), 65V (SEQ ID NO: 321), 67W (SEQ ID NO: 322), 68F (SEQ ID NO: 323), 68N (SEQ ID NO: 324), 68S (SEQ ID NO: 325), 70I (SEQ ID NO: 326), 70N (SEQ ID NO: 327), 72G (SEQ ID NO: 328), 73M (SEQ ID NO: 329), 73P (SEQ ID NO: 330), 74L (SEQ ID NO: 331), 76E (SEQ ID NO: 332), 77S (SEQ ID NO: 333), 77Y (SEQ ID NO: 334), 79W (SEQ ID NO: 335), 80I (SEQ ID NO: 336), 80S (SEQ ID NO: 337), 80V (SEQ ID NO: 338), 82K (SEQ ID NO: 339), 82M (SEQ ID NO: 340), 82S (SEQ ID NO: 341), 83F (SEQ ID NO: 342), 83P (SEQ ID NO: 343), 89G (SEQ ID NO: 344), 89V (SEQ ID NO: 345), 91V (SEQ ID NO: 346), 99I (SEQ ID NO: 347), 99L (SEQ ID NO: 348), 100P (SEQ ID NO: 349), 100Q (SEQ ID NO: 350), 101D (SEQ ID NO: 351), 102D (SEQ ID NO: 352), 102G (SEQ ID NO: 353), 103T (SEQ ID NO: 354), 103V (SEQ ID NO: 355), 111P (SEQ ID NO: 356), 111T (SEQ ID NO: 357), 113A (SEQ ID NO: 358), 114I (SEQ ID NO: 359), 115E (SEQ ID NO: 360), 115F (SEQ ID NO: 361), 115N (SEQ ID NO: 362), 115S (SEQ ID NO: 363), 116A (SEQ ID NO: 364), 118N (SEQ ID NO: 365), 128P (SEQ ID NO: 366), 182G (SEQ ID NO: 367), 193P (SEQ ID NO: 368), 304V (SEQ ID NO: 601), 542P (SEQ ID NO: 369), 549P (SEQ ID NO: 370), 640S (SEQ ID NO: 602), 663G (SEQ ID NO: 371), 755S (SEQ ID NO: 372).
corresponding to human MSH2: 100/101-del (SEQ ID NO: 604), 198G (SEQ ID NO: 392), 199R (SEQ ID NO: 400), 272V (SEQ ID NO: 393), 333R (SEQ ID NO: 90), 338R (SEQ ID NO: 607), 439-del (SEQ ID NO: 609), 440P (SEQ ID NO: 610), 503P (SEQ ID NO: 394), 534C (SEQ ID NO: 611), 595R (SEQ ID NO: 614), 603N (SEQ ID NO: 615), 622T (SEQ ID NO: 616), 636P (SEQ ID NO: 99), 639R (SEQ ID NO: 93), 683R (SEQ ID NO: 395), 692R (SEQ ID NO: 95), 697R (SEQ ID NO: 96), 751R (SEQ ID NO: 97).

4. The diagnostic method of claim 3 in which the cancer is colorectal, ovarian or endometrial in nature.

5. A method of developing data useful for determining the susceptibility of humans to the development of cancer associated with loss of DNA mismatch repair function, comprising measuring in an assay which utilizes the yeast Saccharomyces cerevisiae the loss of DNA mismatch repair function, if any, of a DNA mismatch repair protein, wherein the DNA mismatch repair protein has any of the following amino acid sequences:
corresponding to human MLH1: 23D (SEQ ID NO: 262), 29I (SEQ ID NO: 263), 38T (SEQ ID NO: 264), 40F (SEQ ID NO: 265), 40N (SEQ ID NO: 266), 40T (SEQ ID NO: 267), 41E (SEQ ID NO: 268), 41G (SEQ ID NO: 269), 41N (SEQ ID NO: 270), 42E (SEQ ID NO: 271), 42T (SEQ ID NO: 272), 42V (SEQ ID NO: 273), 43A (SEQ ID NO: 274), 43D (SEQ ID NO: 275), 43E (SEQ ID NO: 276), 43F (SEQ ID NO: 277), 43H (SEQ ID NO: 278), 43I (SEQ ID NO: 279), 43L (SEQ ID NO: 280), 43M (SEQ ID NO: 281), 43P (SEQ ID NO: 282), 43S (SEQ ID NO: 283), 43T (SEQ ID NO: 284), 43V (SEQ ID NO: 285), 43W (SEQ ID NO: 286), 43Y (SEQ ID NO: 287), 44D (SEQ ID NO: 288), 44G (SEQ ID NO: 289), 44K (SEQ ID NO: 290), 44M (SEQ ID NO: 291), 44N (SEQ ID NO: 292), 45I (SEQ ID NO: 293), 46T (SEQ ID NO: 294), 47S (SEQ ID NO: 295), 47T (SEQ ID NO: 296), 48G (SEQ ID NO: 297), 48Y (SEQ ID NO: 298), 49E (SEQ ID NO: 299), 49M (SEQ ID NO: 300), 49N (SEQ ID NO: 301), 51A (SEQ ID NO: 302), 51D (SEQ ID NO: 303), 55S (SEQ ID NO: 304), 56M (SEQ ID NO: 305), 56P (SEQ ID NO: 306), 57N (SEQ ID NO: 307), 59F (SEQ ID NO: 308), 59H (SEQ ID NO: 309), 59N (SEQ ID NO: 310), 59T (SEQ ID NO: 311), 61N (SEQ ID NO: 312), 63G (SEQ ID NO: 313), 63Y (SEQ ID NO: 314), 64I (SEQ ID NO: 315), 64S (SEQ ID NO: 316), 65A (SEQ ID NO: 317), 65D (SEQ ID NO: 318), 65E (SEQ ID NO: 319), 65S (SEQ ID NO: 320), 65V (SEQ ID NO: 321), 67W (SEQ ID NO: 322), 68F (SEQ ID NO: 323), 68N (SEQ ID NO: 324), 68S (SEQ ID NO: 325), 70I (SEQ ID NO: 326), 70N (SEQ ID NO: 327), 72G (SEQ ID NO: 328), 73M (SEQ ID NO: 329), 73P (SEQ ID NO: 330), 74L (SEQ ID NO: 331), 76E (SEQ ID NO: 332), 77S (SEQ ID NO: 333), 77Y (SEQ ID NO: 334), 79W (SEQ ID NO: 335), 80I (SEQ ID NO: 336), 80S (SEQ ID NO: 337), 80V (SEQ ID NO: 338), 82K (SEQ ID NO: 339), 82M (SEQ ID NO: 340), 82S (SEQ ID NO: 341), 83F (SEQ ID NO: 342), 83P (SEQ ID NO: 343), 89G (SEQ ID NO: 344), 89V (SEQ ID NO: 345), 91V (SEQ ID NO: 346), 99I (SEQ ID NO: 347), 99L (SEQ ID NO: 348), 100P (SEQ ID NO: 349), 100Q (SEQ ID NO: 350), 101D (SEQ ID NO: 351), 102D (SEQ ID NO: 352), 102G (SEQ ID NO: 353), 103T (SEQ ID NO: 354), 103V (SEQ ID NO: 355), 111P (SEQ ID NO: 356), 111T (SEQ ID NO: 357), 113A (SEQ ID NO: 358), 114I (SEQ ID NO: 359), 115E (SEQ ID NO:360), 115F (SEQ ID NO: 361), 115N (SEQ ID NO:362), 115S (SEQ ID NO:363), 116A (SEQ ID NO: 364), 118N (SEQ ID NO: 365), 128P (SEQ ID NO: 366), 182G (SEQ ID NO: 367), 193P (SEQ ID NO: 368), 304V (SEQ ID NO: 601), 542P (SEQ ID NO: 369), 549P (SEQ ID NO: 370), 640S (SEQ ID NO: 602), 663G (SEQ ID NO: 371), 755S (SEQ ID NO: 372), 22A (SEQ ID NO: 598), 29S (SEQ ID NO: 373), 32V (SEQ ID NO: 374), 36L (SEQ ID NO: 375), 43C (SEQ ID NO: 376), 43G (SEQ ID NO: 377), 43N (SEQ ID NO: 378), 43Q (SEQ ID NO: 379), 43R (SEQ ID NO: 380), 62R (SEQ ID NO: 381), 64D (SEQ ID NO: 382), 71D (SEQ ID NO: 383), 75T (SEQ ID NO: 384), 95T (SEQ ID NO: 385), 136S (SEQ ID NO: 386), 141R (SEQ ID NO: 599), 160V (SEQ ID NO: 387), 272V (SEQ ID NO: 388), 286Q (SEQ ID NO: 600), 441T (SEQ ID NO: 389), 648L (SEQ ID NO: 390), and 659Q (SEQ ID NO: 391).
corresponding to human MSH2: 100/101-del (SEQ ID NO: 604), 198G (SEQ ID NO: 392), 199R (SEQ ID NO: 400), 272V (SEQ ID NO: 393), 333R (SEQ ID NO: 90), 338R (SEQ ID NO: 607), 439-del (SEQ ID NO: 609), 440P (SEQ ID NO: 610), 503P (SEQ D NO: 394), 534C (SEQ ID NO: 611), 595R (SEQ ID NO: 614), 603N (SEQ ID NO: 615), 622T (SEQ ID NO: 616), 636P (SEQ ID NO: 99), 639R (SEQ ID NO: 93), 683R (SEQ ID NO: 395), 692R (SEQ ID NO: 95), 697R (SEQ ID NO: 96), 751R (SEQ ID NO: 97), 30L (SEQ ID NO: 603), 44M (SEQ ID NO: 396), 61P (SEQ ID NO: 397), 127S (SEQ ID NO: 398), 167H (SEQ ID NO: 399), 186S (SEQ ID NO: 89), 199W (SEQ ID NO: 605), 322V (SEQ ID NO: 606), 323C (SEQ ID NO: 401), 333Y (SEQ ID NO: 91), 349L (SEQ ID NO: 608), 390F (SEQ ID NO: 402), 390V (SEQ ID NO: 403), 562V (SEQ ID NO: 612), 583S (SEQ ID NO: 613), 609V (SEQ ID NO: 92), 647K (SEQ ID NO: 100), 656H (SEQ ID NO: 101), 683V (SEQ ID NO: 404), 688I (SEQ ID NO: 405), 691T (SEQ ID NO: 94), 722I (SEQ ID NO: 617), 729V (SEQ ID NO: 102), 735V (SEQ ID NO: 406), 770V (SEQ ID NO: 98), and 845E (SEQ ID NO: 407).

6. The method of claim 5 in which the cancer is colorectal, ovarian or endometrial in nature.

7. The method of claim 5 in which the yeast assay utilizes color change to measure loss of DNA mismatch repair function.

8. The method of claim 7 which utilizes the Ade2 reporter gene (SEQ ID NO: 618).

9. A yeast strain containing a DNA microsatellite sequence within the coding sequence of the native ADE2 gene, where said DNA microsatellite sequence is unstable when carried in a MMR-deficient yeast strain.

10. The yeast strain of claim 9 in which the ADE2 gene is ADE2::MS3::ADE2 (SEQ ID NO: 619).

11. The yeast strain of claim 9 which is YBT41.

12. A DNA molecule consisting of the Saccharomyces cerevisiae ADE2 gene (SEQ ID NO: 618) containing a DNA microsatellite sequence, where said DNA microsatellite sequence is unstable when carried in a MMR-deficient yeast strain.

13. The DNA molecule of claim 11 in which the ADE2 gene is ADE2::MS3::ADE2 (SEQ ID NO: 619).

14. A DNA molecule encoding any one of the following human-yeast hybrid MLH1 proteins: MLH1_(175-267) (SEQ ID NO: 40), which contains human amino acid residues 175-267 replacing yeast amino acid residues 172-267; MLH1_(175-214) (SEQ ID NO: 198), which contains human amino acid residues 175-214 replacing yeast amino acid residues 172-211; MLH11(208-267) (SEQ ID NO: 199), which contains human amino acid residues 208-267 replacing yeast amino acid residues 205-267; MLH1_(265-341) (SEQ ID NO: 200), which contains human amino acid residues 265-341 replacing yeast amino acid residues 265-341; MLH1_(265-311) (SEQ ID NO: 201), which contains human amino acid residues 265-311 replacing yeast amino acid residues 265-311; and MLH1_(298-341) (SEQ ID NO: 202), which contains human amino acid residues 298-341 replacing yeast amino acid residues 298-341.

15. A DNA molecule encoding any one of the following human-yeast hybrid MSH2 proteins: MSH2_h(621-739) (SEQ ID NO: 104), which contains human amino acid residues 621-832 replacing yeast amino acid residues 639-758; MSH2_(621-832)ins9 (SEQ ID NO: 535), which contains human amino acid residues 621-832 replacing yeast amino acid residues 639-860 and contains the peptide KNLKEQKHD (single letter amino acid code) inserted between human codons 807 and 808; and MSH2_(730-832)ins9 (SEQ ID NO: 536), which contains human amino acid residues 730-832 replacing yeast amino acid residues 749-860 and contains the peptide KNLKEQKHD (single letter amino acid code) inserted between human codons 807 and 808.

16. A variant of the hMLH1 protein which exhibits a partial or complete loss of MMR function selected from the group consisting of 29I (SEQ ID NO: 263), 38T (SEQ ID NO: 264), 40F (SEQ ID NO: 265), 40N (SEQ ID NO: 266), 40T (SEQ ID NO: 267), 41E (SEQ ID NO: 268), 41G (SEQ ID NO: 269), 41N (SEQ ID NO: 270), 42E (SEQ ID NO: 271), 42T (SEQ ID NO: 272), 42V (SEQ ID NO: 273), 43A (SEQ ID NO: 274), 43D (SEQ ID NO: 275), 43E (SEQ ID NO: 276), 43F (SEQ ID NO: 277), 43H (SEQ ID NO: 278), 43I (SEQ ID NO: 279), 43L (SEQ ID NO: 280), 43M (SEQ ID NO: 281), 43P (SEQ ID NO: 282), 43S (SEQ ID NO: 283), 43T (SEQ ID NO: 284), 43V (SEQ ID NO: 285), 43W (SEQ ID NO: 286), 43Y (SEQ ID NO: 287), 44D (SEQ ID NO: 288), 44G (SEQ ID NO: 289), 44K (SEQ ID NO: 290), 44M (SEQ ID NO: 291), 44N (SEQ ID NO: 292), 45I (SEQ ID NO: 293), 46T (SEQ ID NO: 294), 47S (SEQ ID NO: 295), 47T (SEQ ID NO: 296), 48G (SEQ ID NO: 297), 48Y (SEQ ID NO: 298), 49M (SEQ ID NO: 300), 49N (SEQ ID NO: 301), 51A (SEQ ID NO: 302), 51D (SEQ ID NO: 303), 55S (SEQ ID NO: 304), 56M (SEQ ID NO: 305), 56P (SEQ ID NO: 306), 57N (SEQ ID NO: 307), 59F (SEQ ID NO: 308), 59H (SEQ ID NO: 309), 59N (SEQ ID NO: 310), 59T (SEQ ID NO: 311), 61N (SEQ ID NO: 312), 63G (SEQ ID NO: 313), 63Y (SEQ ID NO: 314), 64I (SEQ ID NO: 315), 65A (SEQ ID NO: 317), 65D (SEQ ID NO: 318), 65E (SEQ ID NO: 319), 65S (SEQ ID NO: 320), 65V (SEQ ID NO: 321), 68F (SEQ ID NO: 323), 68S (SEQ ID NO: 325), 70I (SEQ ID NO: 326), 70N (SEQ ID NO: 327), 72G (SEQ ID NO: 328), 73M (SEQ ID NO: 329), 73P (SEQ ID NO: 330), 74L (SEQ ID NO: 331), 76E (SEQ ID NO: 332), 77S (SEQ ID NO: 333), 79W (SEQ ID NO: 335), 80I (SEQ ID NO: 336), 80S (SEQ ID NO: 337), 82K (SEQ ID NO: 339), 82M (SEQ ID NO: 340), 82S (SEQ ID NO: 341), 83F (SEQ ID NO: 342), 83P (SEQ ID NO: 343), 89G (SEQ ID NO: 344), 89V (SEQ ID NO: 345), 91V (SEQ ID NO: 346), 99I (SEQ ID NO: 347), 99L (SEQ ID NO: 348), 100Q (SEQ ID NO: 350), 101D (SEQ ID NO: 351), 102G (SEQ ID NO: 353), 103T (SEQ ID NO: 354), 103V (SEQ ID NO: 355), 111P (SEQ ID NO: 356), 111T (SEQ ID NO: 357), 113A (SEQ ID NO: 358), 114I (SEQ ID NO: 359), 115E (SEQ ID NO: 360), 115F (SEQ ID NO: 361), 115N (SEQ ID NO: 362), 15S (SEQ ID NO: 363), 116A (SEQ ID NO: 364), and 118N (SEQ ID NO: 365)

17. A variant of the hMLH1 protein which exhibits a normal level of MMR function selected from the group consisting of 36L (SEQ ID NO: 375), 43C (SEQ ID NO: 376), 43G (SEQ ID NO: 377), 43N (SEQ ID NO: 378), 43Q (SEQ ID NO: 379), 43R (SEQ ID NO: 380), 62R (SEQ ID NO: 381), 64D (SEQ ID NO: 382), 71D (SEQ ID NO: 383), 75T (SEQ ID NO: 384), 95T (SEQ ID NO: 385), and 136S (SEQ ID NO: 386)

18. A DNA molecule encoding the variant protein of claim 16 or 17.

19. A method of advising on the susceptibility of a particular human subject to the development of cancer associated with loss of DNA mismatch repair function, which utilizes any of the data developed by the method of claims 1, 3 or 5.

20. The method of claim 19 wherein the cancer is colorectal, ovarian or endometrial.

The application's sequence listing, which the Patent Office published only in electronic form, follows.

SEQUENCE LISTING (619 sequences)

SEQ ID NO: 1 - DNA, 31 bp, Artificial sequence
  oligonucleotide for making site-directed mutation in yeast MLH1 g ene
caaaattgctgcaggtgatatcataatatcc

SEQ ID NO: 2 - DNA, 31 bp, Artificial sequence
  oligonucleotide for making site-directed mutation in yeast MLH1 g ene
ggatattatgatatcacctgcagcaattttg

SEQ ID NO: 3 - DNA, 33 bp, Artificial sequence
  oligonucleotide for making site-directed mutation in yeast MLH1 g ene
cagataacggatcctggattaataaagcagacc

SEQ ID NO: 4 - DNA, 33 bp, Artificial sequence
  oligonucleotide for making site-directed mutation in yeast MLH1 g ene
ggtctgctttattaatccaggatccgttatctg

SEQ ID NO: 5 - DNA, 36 bp, Artificial sequence
  oligonucleotide for making site-directed mutation in yeast MLH1 g ene
gcagacctaccaatattatatgagcgattcacgacg

SEQ ID NO: 6 - DNA, 36 bp, Artificial sequence
  oligonucleotide for making site-directed mutation in yeast MLH1 g ene
cgtcgtggatcgctcatataatattggtaggtctgc

SEQ ID NO: 7 - DNA, 33 bp, Artificial sequence
  oligonucleotide for making site-directed mutation in yeast MLH1 g ene
caaacgtatggattcccgggagaagctttagcc

SEQ ID NO: 8 - DNA, 33 bp, Artificial sequence
  oligonucleotide for making site-directed mutation in yeast MLH1 g ene
ggctaaagcttctcccgggaatccatacgtttg

SEQ ID NO: 9 - DNA, 32 bp, Artificial sequence
  oligonucleotide for making site-directed mutation in yeast MLH1 g ene
ggattccgaggagacgctttagccagtatctc

SEQ ID NO: 10 - DNA, 32 bp, Artificial sequence
  oligonucleotide for making site-directed mutation in yeast MLH1 g ene
gagatactggctaaagcgtctcctcggaatcc

SEQ ID NO: 11 - DNA, 32 bp, Artificial sequence
  oligonucleotide for making site-directed mutation in yeast MLH1 g ene
ttagatgttgtcgggggatacgccattcattc

SEQ ID NO: 12 - DNA, 32 bp, Artificial sequence
  oligonucleotide for making site-directed mutation in yeast MLH1 g ene
gaatgaatggcgtatcccccgacaacatctaa

SEQ ID NO: 13 - DNA, 33 bp, Artificial sequence
  oligonucleotide for making site-directed mutation in yeast MLH1 g ene
ccaaggacattggctttccctgtaaaaagttcg

SEQ ID NO: 14 - DNA, 33 bp, Artificial sequence
  oligonucleotide for making site-directed mutation in yeast MLH1 g ene
cgaactttttacagggaaagccaatgtccttgg

SEQ ID NO: 15 - DNA, 33 bp, Artificial sequence
  oligonucleotide for making site-directed mutation in yeast MLH1 g ene
gtgacatgtgatcttgttcgaagagctttgaac

SEQ ID NO: 16 - DNA, 33 bp, Artificial sequence
  oligonucleotide for making site-directed mutation in yeast MLH1 g ene
gttcaaagctcttcgaacaagatcacatgtcac

SEQ ID NO: 17 - DNA, 33 bp, Artificial sequence; identical to SEQ ID NO: 16
  oligonucleotide for making site-directed mutation in yeast MLH1 g ene

SEQ ID NO: 18 - DNA, 28 bp, Artificial sequence
  oligonucleotide for making site-directed mutation in yeast MLH1 g ene
gtcagcttttctgtctcttgggagtggc

SEQ ID NO: 19 - DNA, 30 bp, Artificial sequence
  oligonucleotide for making site-directed mutation in yeast MLH1 g ene
gattagccgctattcctcatgacttaaagc

SEQ ID NO: 20 - DNA, 30 bp, Artificial sequence
  oligonucleotide for making site-directed mutation in yeast MLH1 g ene
gctttaagtcatgaggaatagcggctaatc

SEQ ID NO: 21 - DNA, 34 bp, Artificial sequence
  oligonucleotide for making site-directed mutation in yeast MLH1 g ene
gacttaaagctttttccaatcgattacggatctg

SEQ ID NO: 22 - DNA, 34 bp, Artificial sequence
  oligonucleotide for making site-directed mutation in yeast MLH1 g ene
cagatccgtaatcgattggaaaaagctttaagtc

SEQ ID NO: 23 - DNA, 34 bp, Artificial sequence
  oligonucleotide for making site-directed mutation in yeast MLH1 g ene
ccattttttatatatcagctgggtaaagaagttg

SEQ ID NO: 24 - DNA, 34 bp, Artificial sequence
  oligonucleotide for making site-directed mutation in yeast MLH1 g ene
caacttctttacccagctgatatataaaaaatgg

SEQ ID NO: 25 - DNA, 32 bp, Artificial sequence
  oligonucleotide for making site-directed mutation in yeast MLH1 g ene
cctgggtaaaggagtcgactgggaggatgaac

SEQ ID NO: 26 - DNA, 32 bp, Artificial sequence
  oligonucleotide for making site-directed mutation in yeast MLH1 g ene
gttcatcctcccagtcgactcctttacccagg

SEQ ID NO: 27 - DNA, 36 bp, Artificial sequence
  oligonucleotide for making site-directed mutation in yeast MLH1 g ene
ctatacaaagttttcgaaagctgttaactttaaaac

SEQ ID NO: 28 - DNA, 36 bp, Artificial sequence
  oligonucleotide for making site-directed mutation in yeast MLH1 g ene
gttttaaagttaacagctttcgaaaactttgtatag

SEQ ID NO: 29 - DNA, 2310 bp, Saccharomyces cerevisiae
atgtctctcagaataaaagcacttgatgcatcagtggttaacaaaattgctgcaggtgagatcataatatcccccgtaaatgctctcaaagaaatgatggagaattccatcgatgcgaatgctacaatgattgatattctagtcaaggaaggaggaattaaggtacttcaaataacagataacggatctggaattaataaagcagacctgccaatcttatgtgagcgattcacgacgtccaaattacaaaaattcgaagatttgagtcagattcaaacgtatggattccgaggagaagctttagccagtatctcacatgtggcaagagtcacagtaacgacaaaagttaaagaagacagatgtgcatggagagtttcatatgcagaaggtaagatgttggaaagccccaaacctgttgctggaaaagacggtaccacgatcctagttgaagacctttttttcaatattccttctagattaagggccttgaggtcccataatgatgaatactctaaaatattagatgttgtcgggcgatacgccattcattccaaggacattggcttttcttgtaaaaagttcggagactctaattattctttatcagttaaaccttcatatacagtccaggataggattaggactgtgttcaataaatctgtggcttcgaatttaattacttttcatatcagcaaagtagaagatttaaacctggaaagcgttgatggaaaggtgtgtaatttgaatttcatatccaaaaagtccatttcattaatttttttcattaataatagactagtgacatgtgatcttctaagaagagctttgaacagcgtttactccaattatctgccaaagggcttcagaccttttatttatttgggaattgttatagatccggcggctgttgatgttaacgttcacccgacaaagagagaggttcgtttcctgagccaagatgagatcatagagaaaatcgccaatcaattgcacgccgaattatctgccattgatacttcacgtactttcaaggcttcttcaatttcaacaaacaagccagagtcattgataccatttaatgacaccatagaaagtgataggaataggaagagtctccgacaagcccaagtggtagagaattcatatacgacagccaatagtcaactaaggaaagcgaaaagacaagagaataaactagtcagaatagatgcttcacaagctaaaattacgtcatttttatcctcaagtcaacagttcaactttgaaggatcgtctacaaagcgacaactgagtgaacccaaggtaacaaatgtaagccactcccaagaggcagaaaagctgacactaaatgaaagcgaacaaccgcgtgatgccaatacaatcaatgataatgacttgaaggatcaacctaagaagaaacaaaagttgggggattataaagttccaagcattgccgatgacgaaaagaatgcactcccgatttcaaaagacgggtatattagagtacctaaggagcgagttaatgttaatcttacgagtatcaagaaattgcgtgaaaaagtagatgattcgatacatcgagaactaacagacatttttgcaaatttgaattacgttggggttgtagatgaggaaagaagattagccgctattcagcatgacttaaagctttttttaatagattacggatctgtgtgctatgagctattctatcagattggtttgacagacttcgcaaactttggtaagataaacctacagagtacaaatgtgtcagatgatatagttttgtataatctcctatcagaatttgacgagttaaatgacgatgcttccaaagaaaaaataattagtaaaatatgggacatgagcagtatgctaaatgagtactattccatagaattggtgaatgatggtctagataatgacttaaagtctgtgaagctaaaatctctaccactacttttaaaaggctacattccatctctggtcaagttaccattttttatatatcgcctgggtaaagaagttgattgggaggatgaacaagagtgtctagatggtattttaagagagattgcattactctatatacctgatatggttccgaaagtcgatacactcgatgcatcgttgtcagaagacgaaaaagcccagtttataaatagaaaggaacacatatcctcattactagaacacgttctcttcccttgtatcaaacgaaggttcctggcccctagacacattctcaaggatgtcgtggaaatagccaaccttccagatctatacaaagtttttgagaggtgttaa

SEQ ID NO: 30 - protein, 769 aa, Saccharomyces cerevisiae
MSLRIKALDASVVNKIAAGEIIISPVNALKEMMENSIDANATMIDILVKEGGIKVLQITDNGSGINKADLPILCERFTTSKLQKFEDLSQIQTYGFRGEALASISHVARVTVTTKVKEDRCAWRVSYAEGKMLESPKPVAGKDGTTILVEDLFFNIPSRLRALRSHNDEYSKILDVVGRYAIHSKDIGFSCKKFGDSNYSLSVKPSYTVQDRIRTVFNKSVASNLITFHISKVEDLNLESVDGKVCNLNFISKKSISLIFFINNRLVTCDLLRRALNSVYSNYLPKGFRPFIYLGIVIDPAAVDVNVHPTKREVRFLSQDEIIEKIANQLHAELSAIDTSRTFKASSISTNKPESLIPFNDTIESDRNRKSLRQAQVVENSYTTANSQLRKAKRQENKLVRIDASQAKITSFLSSSQQFNFEGSSTKRQLSEPKVTNVSHSQEAEKLTLNESEQPRDANTINDNDLKDQPKKKQKLGDYKVPSIADDEKNALPISKDGYIRVPKERVNVNLTSIKKLREKVDDSIHRELTDIFANLNYVGVVDEERRLAAIQHDLKLFLIDYGSVCYELFYQIGLTDFANFGKINLQSTNVSDDIVLYNLLSEFDELNDDASKEKIISKIWDMSSMLNEYYSIELVNDGLDNDLKSVKLKSLPLLLKGYIPSLVKLPFFIYRLGKEVDWEDEQECLDGILREIALLYIPDMVPKVDTLDASLSEDEKAQFINRKEHISSLLEHVLFPCIKRRFLAPRHILKDVVEIANLPDLYKVFERC

SEQ ID NO: 31 - DNA, 2271 bp, Homo sapiens
atgtcgttcgtggcaggggttattcggcggctggacgagacagtggtgaaccgcatcgcggcgggggaagttatccagcggccagctaatgctatcaaagagatgattgagaactgtttagatgcaaaatccacaagtattcaagtgattgttaaagagggaggcctgaagttgattcagatccaagacaatggcaccgggatcaggaaagaagatctggatattgtatgtgaaaggttcactactagtaaactgcagtcctttgaggatttagccagtatttctacctatggctttcgaggtgaggctttggccagcataagccatgtggctcatgttactattacaacgaaaacagctgatggaaagtgtgcatacagagcaagttactcagatggaaaactgaaagcccctcctaaaccatgtgctggcaatcaagggacccagatcacggtggaggaccttttttacaacatagccacgaggagaaaagctttaaaaaatccaagtgaagaatatgggaaaattttggaagttgttggcaggtattcagtacacaatgcaggcattagtttctcagttaaaaaacaaggagagacagtagctgatgttaggacactacccaatgcctcaaccgtggacaatattcgctccgtctttggaaatgctgttagtcgagaactgatagaaattggatgtgaggataaaaccctagccttcaaaatgaatggttacatatccaatgcaaactactcagtgaagaagtgcatcttcttactcttcatcaaccatcgtctggtagaatcaacttccttgagaaaagccatagaaacagtgtatgcagcctatttgcccaaaaacacacacccattcctgtacctcagtttagaaatcagtccccagaatgtggatgttaatgtgcaccccacaaagcatgaagttcacttcctgcacgaggagagcatcctggagcgggtgcagcagcacatcgagagcaagctcctgggctccaattcctccaggatgtacttcacccagactttgctaccaggacttgctggcccctctggggagatggttaaatccacaacaagtctgacctcgtcttctacttctggaagtagtgataaggtctatgcccaccagatggttcgtacagattcccgggaacagaagcttgatgcatttctgcagcctctgagcaaacccctgtccagtcagccccaggccattgtcacagaggataagacagatatttctagtggcagggctaggcagcaagatgaggagatgcttgaactcccagcccctgctgaagtggctgccaaaaatcagagcttggagggggatacaacaaaggggacttcagaaatgtcagagaagagaggacctacttccagcaaccccagaaagagacatcgggaagattctgatgtggaaatggtggaagatgattcccgaaaggaaatgactgcagcttgtaccccccggagaaggatcattaacctcactagtgttttgagtctccaggaagaaattaatgagcagggacatgaggttctccgggagatgttgcataaccactccttcgtgggctgtgtgaatcctcagtgggccttggcacagcatcaaaccaagttataccttctcaacaccaccaagcttagtgaagaactgttctaccagatactcatttatgattttgccaattttggtgttctcaggttatcggagccagcaccgctctttgaccttgccatgcttgccttagatagtccagagagtggctggacagaggaagatggtcccaaagaaggacttgctgaatacattgttgagtttctgaagaagaaggctgagatgcttgcagactatttctctttggaaattgatgaggaagggaacctgattggattaccccttctgattgacaactatgtgccccctttggagggactgcctatcttcattcttcgactagccactgaggtgaattgggacgaagaaaaggaatgttttgaaagcctcagtaaagaatgcgctatgttctattccatccggaagcagtacatatctgaggagtcgaccctctcaggccagcagagtgaagtgcctggctccattccaaactcctggaagtggactgtggaacacattgtctataaagccttgcgctcacacattctgcctcctaaacatttcacagaagatggaaatatcctgcagcttgctaacctgcctgatctatacaaagtctttgagaggtgttaa

SEQ ID NO: 32 - protein, 756 aa, Homo sapiens [sequence omitted]

SEQ ID NO: 33 - DNA, 43 bp, Artificial sequence
  oligonucleotide
gtcccataatgatgaatactctaaaattttggaagttgttggc

SEQ ID NO: 34 - DNA, 39 bp, Artificial sequence
  oligonucleotide
cttcttagaagatcacaggttaccagacgatggtggatg

SEQ ID NO: 35 - DNA, 24 bp, Artificial sequence
  oligonucleotide
gctgcaggtgagatcataatatcc

SEQ ID NO: 36 - DNA, 22 bp, Artificial sequence
  oligonucleotide
agagtattcatcattatgggac

SEQ ID NO: 37 - DNA, 20 bp, Artificial sequence
  oligonucleotide
acctgtgatcttctaagaag

SEQ ID NO: 38 - DNA, 28 bp, Artificial sequence
  oligonucleotide
gcgcctcgagggtattacagccaaaacg

SEQ ID NO: 39 - DNA, 21 bp, Artificial sequence
  oligonucleotide
agtactcatttagcatactgc

SEQ ID NO: 40 - protein, 766 aa, Artificial sequence
  hybrid human-yeast MLH1 protein
MSLRIKALDASVVNKIAAGEIIISPVNALKEMMENSIDANATMIDILVKEGGIKVLQITDNGSGINKADLPILCERFTTSKLQKFEDLSQIQTYGFRGEALASISHVARVTVTTKVKEDRCAWRVSYAEGKMLESPKPVAGKDGTTILVEDLFFNIPSRLRALRSHNDEYSKILEVVGRYSVHNAGISFSVKKQGETVADVRTLPNASTVDNIRSVFGNAVSRELIEIGCEDKTLAFKMNGYISNANYSVKKCIFLLFINHRLVTCDLLRRALNSVYSNYLPKGFRPFIYLGIVIDPAAVDVNVHPTKREVRFLSQDEIIEKIANQLHAELSAIDTSRTFKASSISTNKPESLIPFNDTIESDRNRKSLRQAQVVENSYTTANSQLRKAKRQENKLVRIDASQAKITSFLSSSQQFNFEGSSTKRQLSEPKVTNVSHSQEAEKLTLNESEQPRDANTINDNDLKDQPKKKQKLGDYKVPSIADDEKNALPISKDGYIRVPKERVNVNLTSIKKLREKVDDSIHRELTDIFANLNYVGVVDEERRLAAIQHDLKLFLIDYGSVCYELFYQIGLTDFANFGKINLQSTNVSDDIVLYNLLSEFDELNDDASKEKIISKIWDMSSMLNEYYSIELVNDGLDNDLKSVKLKSLPLLLKGYIPSLVKLPFFIYRLGKEVDWEDEQECLDGILREIALLYIPDMVPKVDTLDASLSEDEKAQFINRKEHISSLLEHVLFPCIKRRFLAPRHILKDVVEIANLPDLYKVFERC

SEQ ID NO: 41 - DNA, 3414 bp, Homo sapiens
atgtctcgccggaagcctgcgtcgggcggcctcgctgcctccagctcagcccctgcgaggcaagcggttttgagccgattcttccagtctacgggaagcctgaaatccacctcctcctccacaggtgcagccgaccaggtggaccctggcgctgcagcggctgcagcggccgcagcggccgcagcgcccccagcgcccccagctcccgccttcccgccccagctgccgccgcacgtagctacagaaattgacagaagaaagaagagaccattggaaaatgatgggcctgttaaaaagaaagtaaagaaagtccaacaaaaggaaggaggaagtgatctgggaatgtctggcaactctgagccaaagaaatgtctgaggaccaggaatgtttcaaagtctctggaaaaattgaaagaattctgctgcgattctgcccttcctcaaagtagagtccagacagaatctctgcaggagagatttgcagttctgccaaaatgtactgattttgatgatatcagtcttctacacgcaaagaatgcagtttcttctgaagattcgaaacgtcaaattaatcaaaaggacacaacactttttgatctcagtcagtttggatcatcaaatacaagtcatgaaaatttacagaaaactgcttccaaatcagctaacaaacggtccaaaagcatctatacgccgctagaattacaatacatagaaatgaagcagcagcacaaagatgcagttttgtgtgtggaatgtggatataagtatagattctttggggaagatgcagagattgcagcccgagagctcaatatttattgccatttagatcacaactttatgacagcaagtatacctactcacagactgtttgttcatgtacgccgcctggtggcaaaaggatataaggtgggagttgtgaagcaaactgaaactgcagcattaaaggccattggagacaacagaagttcactcttttcccggaaattgactgccctttatacaaaatctacacttattggagaagatgtgaatcccctaatcaagctggatgatgctgtaaatgttgatgagataatgactgatacttctaccagctatcttctgtgcatctctgaaaataaggaaaatgttagggacaaaaaaaagggcaacatttttattggcattgtgggagtgcagcctgccacaggcgaggttgtgtttgatagtttccaggactctgcttctcgttcagagctagaaacccggatgtcaagcctgcagccagtagagctgctgcttccttcggccttgtccgagcaaacagaggcgctcatccacagagccacatctgttagtgtgcaggatgacagaattcgagtcgaaaggatggataacatttattttgaatacagccatgctttccaggcagttacagagttttatgcaaaagatacagttgacatcaaaggttctcaaattatttctggcattgttaacttagagaagcctgtgatttgctctttggctgccatcataaaatacctcaaagaattcaacttggaaaagatgctctccaaacctgagaattttaaacagctatcaagtaaaatggaatttatgacaattaatggaacaacattaaggaatctggaaatcctacagaatcagactgatatgaaaaccaaaggaagtttgctgtgggttttagaccacactaaaacttcatttgggagacggaagttaaagaagtgggtgacccagccactccttaaattaagggaaataaatgcccggcttgatgctgtatcggaagttctccattcagaatctagtgtgtttggtcagatagaaaatcatctacgtaaattgcccgacatagggaggggactctgtagcatttatcacaaaaaatgttctacccaagagttcttcttgattgtcaaaactttatatcacctaaagtcagaatttcaagcaataatacctgctgttaattcccacattcagtcagacttgctccggaccgttattttagaaattcctgaactcctcagtccagtggagcattacttaaagatactcaatgaacaagctgccaaagttggggataaaactgaattatttaaagacctttctgacttccctttaataaaaaagaggaaggatgaaattcaaggtgttattgacgagatccgaatgcatttgcaagaaatacgaaaaatactaaaaaatccttctgcacaatatgtgacagtatcaggacaggagtttatgatagaaataaagaactctgctgtatcttgtataccaactgattgggtaaaggttggaagcacaaaagctgtgagccgctttcactctccttttattgtagaaaattacagacatctgaatcagctccgggagcagctagtccttgactgcagtgctgaatggcttgattttctagagaaattcagtgaacattatcactccttgtgtaaagcagtgcatcacctagcaactgttgactgcattttctccctggccaaggtcgctaagcaaggagattactgcagaccaactgtacaagaagaaagaaaaattgtaataaaaaatggaaggcaccctgtgattgatgtgttgctgggagaacaggatcaatatgtcccaaataatacagatttatcagaggactcagagagagtaatgataattaccggaccaaacatgggtggaaagagctcctacataaaacaagttgcattgattaccatcatggctcagattggctcctatgttcctgcagaagaagcgacaattgggattgtggatggcattttcacaaggatgggtgctgcagacaatatatataaaggacggagtacatttatggaagaactgactgacacagcagaaataatcagaaaagcaacatcacagtccttggttatcttggatgaactaggaagagggacgagcactcatgatggaattgccattgcctatgctacacttgagtatttcatcagagatgtgaaatccttaaccctgtttgtcacccattatccgccagtttgtgaactagaaaaaaattactcacaccaggtggggaattaccacatgggattcttggtcagtgaggatgaaagcaaactggatccaggcacagcagaacaagtccctgattttgtcaccttcctttaccaaataactagaggaattgcagcaaggagttatggattaaatgtggctaaactagcagatgttcctggagaaattttgaagaaagcagctcacaagtcaaaagagctggaaggattaataaatacgaaaagaaagagactcaagtattttgcaaagttatggacgatgcataatgcacaagacctgcagaagtggacagaggagttcaacatggaagaaacacagacttctcttcttcattaa

SEQ ID NO: 42 - DNA, 4083 bp, Homo sapiens
atgtcgcgacagagcaccctgtacagcttcttccccaagtctccggcgctgagtgatgccaacaaggcctcggccagggcctcacgcgaaggcggccgtgccgccgctgcccccggggcctctccttccccaggcggggatgcggcctggagcgaggctgggcctgggcccaggcccttggcgcgatccgcgtcaccgcccaaggcgaagaacctcaacggagggctgcggagatcggtagcgcctgctgcccccaccagttgtgacttctcaccaggagatttggtttgggccaagatggagggttacccctggtggccttgtctggtttacaaccacccctttgatggaacattcatccgcgagaaagggaaatcagtccgtgttcatgtacagttttttgatgacagcccaacaaggggctgggttagcaaaaggcttttaaagccatatacaggttcaaaatcaaaggaagcccagaagggaggtcatttttacagtgcaaagcctgaaatactgagagcaatgcaacgtgcagatgaagccttaaataaagacaagattaagaggcttgaattggcagtttgtgatgagccctcagagccagaagaggaagaagagatggaggtaggcacaacttacgtaacagataagagtgaagaagataatgaaattgagagtgaagaggaagtacagcctaagacacaaggatctaggcgaagtagccgccaaataaaaaaacgaagggtcatatcagattctgagagtgacattggtggctctgatgtggaatttaagccagacactaaggaggaaggaagcagtgatgaaataagcagtggagtgggggatagtgagagtgaaggcctgaacagccctgtcaaagttgctcgaaagcggaagagaatggtgactggaaatggctctcttaaaaggaaaagctctaggaaggaaacgccctcagccaccaaacaagcaactagcatttcatcagaaaccaagaatactttgagagctttctctgcccctcaaaattctgaatcccaagcccacgttagtggaggtggtgatgacagtagtcgccctactgtttggtatcatgaaactttagaatggcttaaggaggaaaagagaagagatgagcacaggaggaggcctgatcaccccgattttgatgcatctacactctatgtgcctgaggatttcctcaattcttgtactcctgggatgaggaagtggtggcagattaagtctcagaactttgatcttgtcatctgttacaaggtggggaaattttatgagctgtaccacatggatgctcttattggagtcagtgaactggggctggtattcatgaaaggcaactgggcccattctggctttcctgaaattgcatttggccgttattcagattccctggtgcagaagggctataaagtagcacgagtggaacagactgagactccagaaatgatggaggcacgatgtagaaagatggcacatatatccaagtatgatagagtggtgaggagggagatctgtaggatcattaccaagggtacacagacttacagtgtgctggaaggtgatccctctgagaactacagtaagtatcttcttagcctcaaagaaaaagaggaagattcttctggccatactcgtgcatatggtgtgtgctttgttgatacttcactgggaaagtttttcataggtcagttttcagatgatcgccattgttcgagatttaggactctagtggcacactatcccccagtacaagttttatttgaaaaaggaaatctctcaaaggaaactaaaacaattctaaagagttcattgtcctgttctcttcaggaaggtctgatacccggctcccagttttgggatgcatccaaaactttgagaactctccttgaggaagaatattttagggaaaagctaagtgatggcattggggtgatgttaccccaggtgcttaaaggtatgacttcagagtctgattccattgggttgacaccaggagagaaaagtgaattggccctctctgctctaggtggttgtgtcttctacctcaaaaaatgccttattgatcaggagcttttatcaatggctaattttgaagaatatattcccttggattctgacacagtcagcactacaagatctggtgctatcttcaccaaagcctatcaacgaatggtgctagatgcagtgacattaaacaacttggagatttttctgaatggaacaaatggttctactgaaggaaccctactagagagggttgatacttgccatactccttttggtaagcggctcctaaagcaatggctttgtgccccactctgtaaccattatgctattaatgatcgtctagatgccatagaagacctcatggttgtgcctgacaaaatctccgaagttgtagagcttctaaagaagcttccagatcttgagaggctactcagtaaaattcataatgttgggtctcccctgaagagtcagaaccacccagacagcagggctataatgtatgaagaaactacatacagcaagaagaagattattgattttctttctgctctggaaggattcaaagtaatgtgtaaaattatagggatcatggaagaagttgctgatggttttaagtctaaaatccttaagcaggtcatctctctgcagacaaaaaatcctgaaggtcgttttcctgatttgactgtagaattgaaccgatgggatacagcctttgaccatgaaaaggctcgaaagactggacttattactcccaaagcaggctttgactctgattatgaccaagctcttgctgacataagagaaaatgaacagagcctcctggaatacctagagaaacagcgcaacagaattggctgtaggaccatagtctattgggggattggtaggaaccgttaccagctggaaattcctgagaatttcaccactcgcaatttgccagaagaatacgagttgaaatctaccaagaagggctgtaaacgatactggaccaaaactattgaaaagaagttggctaatctcataaatgctgaagaacggagggatgtatcattgaaggactgcatgcggcgactgttctataactttgataaaaattacaaggactggcagtctgctgtagagtgtatcgcagtgttggatgttttactgtgcctggctaactatagtcgagggggtgatggtcctatgtgtcgcccagtaattctgttgccggaagataccccccccttcttagagcttaaaggatcacgccatccttgcattacgaagactttttttggagatgattttattcctaatgacattctaataggctgtgaggaagaggagcaggaaaatggcaaagcctattgtgtgcttgttactggaccaaatatggggggcaagtctacgcttatgagacaggctggcttattagctgtaatggcccagatgggttgttacgtccctgctgaagtgtgcaggctcacaccaattgatagagtgtttactagacttggtgcctcagacagaataatgtcaggtgaaagtacattttttgttgaattaagtgaaactgccagcatactcatgcatgcaacagcacattctctggtgcttgtggatgaattaggaagaggtactgcaacatttgatgggacggcaatagcaaatgcagttgttaaagaacttgctgagactataaaatgtcgtacattattttcaactcactaccattcattagtagaagattattctcaaaatgttgctgtgcgcctaggacatatggcatgcatggtagaaaatgaatgtgaagaccccagccaggagactattacgttcctctataaattcattaagggagcttgtcctaaaagctatggctttaatgcagcaaggcttgctaatctcccagaggaagttattcaaaagggacatagaaaagcaagagaatttgagaagatgaatcagtcactacgattatttcgggaagtttgcctggctagtgaaaggtcaactgtagatgctgaagctgtccataaattgctgactttgattaaggaattatag

SEQ ID NO: 43 - DNA, 2811 bp, Homo sapiens
atgctgaggcctgagatctcatcaacctcgccttctgccccggcggtttccccgtcgtcgggagaaacccgctcacctcagggtccccgctacaatttcggactccaggagactccacagagccgcccttcggtccaggtggtctctgcatccacctgtcctggcacgtcaggagctgcgggcgaccggagcagcagcagcagcagccttccctgccccgcgccaaactcccggccagctcaaggttcatactttggaaacaaaagagcttatgcagaaaacacagttgcatcaaattttacttttggtgcaagctcatcttctgcacgagatactaattatcctcaaacacttaaaactccattgtctactggaaatcctcagagatcaggttataagagctggacaccacaagtgggatattcagcttcatcctcatctgcgatttctgcacactccccatcagttattgtagctgttgtagaagggagaggacttgccagaggtgaaataggaatggcaagtattgatttaaaaaacccccaaattatactatcccagtttgcagacaacacaacatatgcaaaggtgatcactaaacttaaaattttatcacctttggaaataataatgtcaaatactgcttgtgctgtggggaattccaccaagttgttcactctgatcacagaaaatttcaagaatgttaatttcactactatccaaaggaaatacttcaatgaaacaaaaggattagagtacattgaacagttatgcatagcagaattcagcactgtcctaatggaggttcagtccaagtattactgccttgcagctgttgcagctttgttaaaatatgttgaatttattcaaaattcagtttatgcaccaaaatcactgaagatttgtttccagggtagtgaacagacagccatgatagattcatcatcagcccaaaaccttgaattgttaattaataatcaagactataggaataatcacactctctttggtgttctaaattatactaagactcctggagggagtagacgacttcgttctaatatattagagcctctagttgatattgaaaccattaacatgagattagattgtgttcaagaactacttcaagatgaggaactattttttggacttcaatcagttatatcaagatttcttgatacagagcagcttctttctgttttagtccaaattccaaagcaagacacggtcaatgctgctgaatcaaagataacaaatttaatatacttaaaacataccttggaacttgtggatcctttaaagattgctatgaagaactgtaacacacctttattaagagcttactatggttccttggaagacaagaggtttggaatcatacttgaaaagattaaaacagtaattaatgatgatgcaagatacatgaaaggatgcctaaacatgaggactcagaagtgctatgcagtgaggtctaacataaatgaatttcttgacatagcaagaagaacatacacagagattgtagatgacatagcaggaatgatatcacaacttggagaaaaatatagtctacctttaaggacaagttttagctctgctcgaggatttttcatccagatgactacagattgtatagccctacctagtgatcaacttccttcagaatttattaagatttctaaagtgaaaaattcttacagctttacatcagcagatttaattaaaatgaatgaaagatgccaagaatctttgagagaaatctatcacatgacttatatgatagtgtgcaaactgcttagtgagatttatgaacatattcattgcttatataaactatctgacactgtgtcaatgctggatatgctactgtcatttgctcatgcctgcactctttctgactatgttcgaccagaatttactgatactttagcaatcaaacagggatggcatcctattcttgaaaaaatatctgcggaaaaacctattgccaacaatacctatgttacagaagggagtaattttttgatcataactggaccaaacatgagtggaaaatccacatatttaaaacagattgctctttgtcagattatggcccagattggatcatatgttccagcagaatattcttcctttagaattgctaaacagatttttacaagaattagtactgatgatgatatcgaaacaaattcatcaacatttatgaaagaaatgaaagagatagcatatattctacataatgctaatgacaaatcgctcatattaattgatgaacttggcagaggtactaatacggaagaaggtattggcatttgttatgctgtttgtgaatatctactgagcttaaaggcatttacactgtttgctacacatttcctggaactatgccatattgatgccctgtatcctaatgtagaaaacatgcattttgaagttcaacatgtaaagaatacctcaagaaataaagaagcaattttgtatacctacaaactttctaagggactcacagaagagaaaaattatggattaaaagctgcagaggtgtcatcacttccaccatcaattgtcttggatgccaaggaaatcacaactcaaattacgagacaaattttgcaaaaccaaaggagtacccctgagatggaaagacagagagctgtgtaccatctagccactaggcttgttcaaactgctcgaaactctcaattggatccagacagtttacgaatatatttaagtaacctcaagaagaagtacaaagaagattttcccaggactgaacaagttccagaaaagactgaagaataa

SEQ ID NO: 44 - DNA, 4290 bp, Homo sapiens
atgatcaagtgcttgtcagttgaagtacaagccaaattgcgttctggtttggccataagctccttgggccaatgtgttgaggaacttgccctcaacagtattgatgctgaagcaaaatgtgtggctgtcagggtgaatatggaaaccttccaagttcaagtgatagacaatggatttgggatggggagtgatgatgtagagaaagtgggaaatcgttatttcaccagtaaatgccactcggtacaggacttggagaatccaaggttttatggtttccgaggagaggccttggcaaatattgctgacatggccagtgctgtggaaatttcgtccaagaaaaacaggacaatgaaaacttttgtgaaactgtttcagagtggaaaagccctgaaagcttgtgaagctgatgtgactagagcaagcgctgggactactgtaacagtgtataacctattttaccagcttcctgtaaggaggaaatgcatggaccctagactggagtttgagaaggttaggcagagaatagaagctctctcactcatgcacccttccatttctttctctttgagaaatgatgtttctggttccatggttcttcagctccctaaaaccaaagacgtatgttcccgattttgtcaaatttatggattgggaaagtcccaaaagctaagagaaataagttttaaatataaagagtttgagcttagtggctatatcagctctgaagcacattacaacaagaatatgcagtttttgtttgtgaacaaaagactagttttaaggacaaagctacataaactcattgactttttattaaggaaagaaagtattatatgcaagccaaagaatggtcccaccagtaggcaaatgaattcaagtcttcggcaccggtctaccccagaactctatggcatatatgtaattaatgtgcagtgccaattctgtgagtatgatgtgtgcatggagccagccaaaactctgattgaatttcagaactgggacactctcttgttttgcattcaggaaggagtgaaaatgtttttaaagcaagaaaaattatttgtggaattatcaggtgaggatattaaggaatttagtgaagataatggttttagtttatttgatgctactcttcagaagcgtgtgacttccgatgagaggagcaatttccaggaagcatgtaataatattttagattcctatgagatgtttaatttgcagtcaaaagctgtgaaaagaaaaactactgcagaaaacgtaaacacacagagttctagggattcagaagctaccagaaaaaatacaaatgatgcatttttgtacatttatgaatcaggtggtccaggccatagcaaaatgacagagccatctttacaaaacaaagacagctcttgctcagaatcaaagatgttagaacaagagacaattgtagcatcagaagctggtgaaaatgagaaacataaaaaatctttcctggaacgtagctctttagaaaatccgtgtggaaccagtttagaaatgtttttaagcccttttcagacaccatgtcactttgaggagagtgggcaggatctagaaatatggaaagaaagtactactgttaatggcatggctgccaacatcttgaaaaataatagaattcagaatcaaccaaagagatttaaagatgctactgaagtgggatgccagcctctgccttttgcaacaacattatggggagtacatagtgctcagacagagaaagagaaaaaaaaagaatctagcaattgtggaagaagaaatgtttttagttatgggcgagttaaattatgttccactggctttataactcatgtagtacaaaatgaaaaaactaaatcaactgaaacagaacattcatttaaaaattatgttagacctggtcccacacgtgcccaagaaacatttggaaatagaacacgtcattcagttgaaactccagacatcaaagatttagccagcactttaagtaaagaatctggtcaattgcccaacaaaaaaaattgcagaacgaatataagttatgggctagagaatgaacctacagcaacttatacaatgttttctgcttttcaggaaggtagcaaaaaatcacaaacagattgcatattatctgatacatccccctctttcccctggtatagacacgtttccaatgatagtaggaaaacagataaattaattggtttctccaaaccaatcgtccgtaagaagctaagcttgagttcacagctaggatctttagagaagtttaagaggcaatatgggaaggttgaaaatcctctggatacagaagtagaggaaagtaatggagtcactaccaatctcagtcttcaagttgaacctgacattctgctgaaggacaagaaccgcttagagaactctgatgtttgtaaaatcactactatggagcatagtgattcagatagtagttgtcaaccagcaagccacatccttgactcagagaagtttccattctccaaggatgaagattgtttagaacaacagatgcctagtttgagagaaagtcctatgaccctgaaggagttatctctctttaatagaaaacctttggaccttgagaagtcatctgaatcactagcctctaaattatccagactgaagggttccgaaagagaaactcaaacaatggggatgatgagtcgttttaatgaacttccaaattcagattccagtaggaaagacagcaagttgtgcagtgtgttaacacaagatttttgtatgttatttaacaacaagcatgaaaaaacagagaatggtgtcatcccaacatcagattctgccacacaggataattcctttaataaaaatagtaaaacacattctaacagcaatacaacagagaactgtgtgatatcagaaactcctttggtattgccctataataattctaaagttaccggtaaagattcagatgttcttatcagagcctcagaacaacagataggaagtcttgactctcccagtggaatgttaatgaatccggtagaagatgccacaggtgaccaaaatggaatttgttttcagagtgaggaatctaaagcaagagcttgttctgaaactgaagagtcaaacacgtgttgttcagattggcagcggcatttcgatgtagccctgggaagaatggtttatgtcaacaaaatgactggactcagcacattcattgccccaactgaggacattcaggctgcttgtactaaagacctgacaactgtggctgtggatgttgtacttgagaatgggtctcagtacaggtgtcaaccttttagaagcgaccttgttcttcctttccttccgagagctcgagcagagaggactgtgatgagacaggataacagagatactgtggatgatactgttagtagcgaatcgcttcagtctttgttctcagaatgggacaatccagtatttgcccgttatccagaggttgctgttgatgtaagcagtggccaggctgagagcttagcagttaaaattcacaacatcttgtatccctatcgtttcaccaaaggaatgattcattcaatgcaggttctccagcaagtagataacaagtttattgcctgtttgatgagcactaagactgaagagaatggcgaggcagattcctacgagaagcaacaggcacaaggctctggtcggaaaaaattactgtcttctactctaattcctccgctagagataacagtgacagaggaacaaaggagactcttatggtgttaccacaaaaatctggaagatctgggccttgaatttgtatttccagacactagtgattctctggtccttgtgggaaaagtaccactatgttttgtggaaagagaagccaatgaacttcggagaggaagatctactgtgaccaagagtattgtggaggaatttatccgagaacaactggagctactccagaccaccggaggcatccaagggacattgccactgactgtccagaaggtgttggcatcccaagcctgccatggggccattaagtttaatgatggcctgagcttacaggaaagttgccgccttattgaagctctgtcctcatgccagctgccattccagtgtgctcacgggagaccttctatgctgccgttagctgacatagaccacttggaacaggaaaaacagattaaacccaacctcactaaacttcgcaaaatggcccaggcctggcgtctctttggaaaagcagagtgtgatacaaggcagagcctgcagcagtccatgcctccctgtgagccaccatga

SEQ ID NO: 45 - DNA, 2799 bp, Homo sapiens
atgaaacaattgcctgcggcaacagttcgactcctttcaagttctcagatcatcacttcggtggtcagtgttgtaaaagagcttattgaaaactccttggatgctggtgccacaagcgtagatgttaaactggagaactatggatttgataaaattgaggtgcgagataacggggagggtatcaaggctgttgatgcacctgtaatggcaatgaagtactacacctcaaaaataaatagtcatgaagatcttgaaaatttgacaacttacggttttcgtggagaagccttggggtcaatttgttgtatagctgaggttttaattacaacaagaacggctgctgataattttagcacccagtatgttttagatggcagtggccacatactttctcagaaaccttcacatcttggtcaaggtacaactgtaactgctttaagattatttaagaatctacctgtaagaaagcagttttactcaactgcaaaaaaatgtaaagatgaaataaaaaagatccaagatctcctcatgagctttggtatccttaaacctgacttaaggattgtctttgtacataacaaggcagttatttggcagaaaagcagagtatcagatcacaagatggctctcatgtcagttctggggactgctgttatgaacaatatggaatcctttcagtaccactctgaagaatctcagatttatctcagtggatttcttccaaagtgtgatgcagaccactctttcactagtctttcaacaccagaaagaagtttcatcttcataaacagtcgaccagtacatcaaaaagatatcttaaagttaatccgacatcattacaatctgaaatgcctaaaggaatctactcgtttgtatcctgttttctttctgaaaatcgatgttcctacagctgatgttgatgtaaatttaacaccagataaaagccaagtattattacaaaataaggaatctgttttaattgctcttgaaaatctgatgacgacttgttatggaccattacctagtacaaattcttatgaaaataataaaacagatgtttccgcagctgacatcgttcttagtaaaacagcagaaacagatgtgctttttaataaagtggaatcatctggaaagaattattcaaatgttgatacttcagtcattccattccaaaatgatatgcataatgatgaatctggaaaaaacactgatgattgtttaaatcaccagataagtattggtgactttggttatggtcattgtagtagtgaaatttctaacattgataaaaacactaagaatgcatttcaggacatttcaatgagtaatgtatcatgggagaactctcagacggaatatagtaaaacttgttttataagttccgttaagcacacccagtcagaaaatggcaataaagaccatatagatgagagtggggaaaatgaggaagaagcaggtcttgaaaactcttcggaaatttctgcagatgagtggagcaggggaaatatacttaaaaattcagtgggagagaatattgaacctgtgaaaattttagtgcctgaaaaaagtttaccatgtaaagtaagtaataataattatccaatccctgaacaaatgaatcttaatgaagattcatgtaacaaaaaatcaaatgtaatagataataaatctggaaaagttacagcttatgatttacttagcaatcgagtaatcaagaaacccatgtcagcaagtgctctttttgttcaagatcatcgtcctcagtttctcatagaaaatcctaagactagtttagaggatgcaacactacaaattgaagaactgtggaagacattgagtgaagaggaaaaactgaaatatgaagagaaggctactaaagacttggaacgatacaatagtcaaatgaagagagccattgaacaggagtcacaaatgtcactaaaagatggcagaaaaaagataaaacccaccagcgcatggaatttggcccagaagcacaagttaaaaacctcattatctaatcaaccaaaacttgatgaactccttcagtcccaaattgaaaaaagaaggagtcaaaatattaaaatggtacagatccccttttctatgaaaaacttaaaaataaattttaagaaacaaaacaaagttgacttagaagagaaggatgaaccttgcttgatccacaatctcaggtttcctgatgcatggctaatgacatccaaaacagaggtaatgttattaaatccatatagagtagaagaagccctgctatttaaaagacttcttgagaatcataaacttcctgcagagccactggaaaagccaattatgttaacagagagtctttttaatggatctcattatttagacgttttatataaaatgacagcagatgaccaaagatacagtggatcaacttacctgtctgatcctcgtcttacagcgaatggtttcaagataaaattgataccaggagtttcaattactgaaaattacttggaaatagaaggaatggctaattgtctcccattctatggagtagcagatttaaaagaaattcttaatgctatattaaacagaaatgcaaaggaagtttatgaatgtagacctcgcaaagtgataagttatttagagggagaagcagtgcgtctatccagacaattacccatgtacttatcaaaagaggacatccaagacattatctacagaatgaagcaccagtttggaaatgaaattaaagagtgtgttcatggtcgcccattttttcatcatttaacctatcttccagaaactacatga

SEQ ID NO: 46 - DNA, 2589 bp, Homo sapiens
atggagcgagctgagagctcgagtacagaacctgctaaggccatcaaacctattgatcggaagtcagtccatcagatttgctctgggcaggtggtactgagtctaagcactgcggtaaaggagttagtagaaaacagtctggatgctggtgccactaatattgatctaaagcttaaggactatggagtggatcttattgaagtttcagacaatggatgtggggtagaagaagaaaacttcgaaggcttaactctgaaacatcacacatctaagattcaagagtttgccgacctaactcaggttgaaacttttggctttcggggggaagctctgagctcactttgtgcactgagcgatgtcaccatttctacctgccacgcatcggcgaaggttggaactcgactgatgtttgatcacaatgggaaaattatccagaaaaccccctacccccgccccagagggaccacagtcagcgtgcagcagttattttccacactacctgtgcgccataaggaatttcaaaggaatattaagaaggagtatgccaaaatggtccaggtcttacatgcatactgtatcatttcagcaggcatccgtgtaagttgcaccaatcagcttggacaaggaaaacgacagcctgtggtatgcacaggtggaagccccagcataaaggaaaatatcggctctgtgtttgggcagaagcagttgcaaagcctcattccttttgttcagctgccccctagtgactccgtgtgtgaagagtacggtttgagctgttcggatgctctgcataatcttttttacatctcaggtttcatttcacaatgcacgcatggagttggaaggagttcaacagacagacagtttttctttatcaaccggcggccttgtgacccagcaaaggtctgcagactcgtgaatgaggtctaccacatgtataatcgacaccagtatccatttgttgttcttaacatttctgttgattcagaatgcgttgatatcaatgttactccagataaaaggcaaattttgctacaagaggaaaagcttttgttggcagttttaaagacctctttgataggaatgtttgatagtgatgtcaacaagctaaatgtcagtcagcagccactgctggatgttgaaggtaacttaataaaaatgcatgcagcggatttggaaaagcccatggtagaaaagcaggatcaatccccttcattaaggactggagaagaaaaaaaagacgtgtccatttccagactgcgagaggccttttctcttcgtcacacaacagagaacaagcctcacagcccaaagactccagaaccaagaaggagccctctaggacagaaaaggggtatgctgtcttctagcacttcaggtgccatctctgacaaaggcgtcctgagacctcagaaagaggcagtgagttccagtcacggacccagtgaccctacggacagagcggaggtggagaaggactcggggcacggcagcacttccgtggattctgaggggttcagcatcccagacacgggcagtcactgcagcagcgagtatgcggccagctccccaggggacaggggctcgcaggaacatgtggactctcaggagaaagcgcctgaaactgacgactctttttcagatgtggactgccattcaaaccaggaagataccggatgtaaatttcgagttttgcctcagccaactaatctcgcaaccccaaacacaaagcgttttaaaaaagaagaaattctttccagttctgacatttgtcaaaagttagtaaatactcaggacatgtcagcctctcaggttgatgtagctgtgaaaattaataagaaagttgtgcccctggacttttctatgagttctttagctaaacgaataaagcagttacatcatgaagcacagcaaagtgaaggggaacagaattacaggaagtttagggcaaagatttgtcctggagaaaatcaagcagccgaagatgaactaagaaaagagataagtaaaacgatgtttgcagaaatggaaatcattggtcagtttaacctgggatttataataaccaaactgaatgaggatatcttcatagtggaccagcatgccacggacgagaagtataacttcgagatgctgcagcagcacaccgtgctccaggggcagaggctcatagcacctcagactctcaacttaactgctgttaatgaagctgttctgatagaaaatctggaaatatttagaaagaatggctttgattttgttatcgatgaaaatgctccagtcactgaaagggctaaactgatttccttgccaactagtaaaaactggaccttcggaccccaggacgtcgatgaactgatcttcatgctgagcgacagccctggggtcatgtgccggccttcccgagtcaagcagatgtttgcctccagagcctgccggaagtcggtgatgattgggactgctcttaacacaagcgagatgaagaaactgatcacccacatgggggagatggaccacccctggaactgtccccatggaaggccaaccatgagacacatcgccaacctgggtgtcatttctcagaactga

SEQ ID NO: 47 - DNA, 30 bp, Artificial sequence
  oligonucleotide
ggagtgtattccagtctagagagtttcttg

SEQ ID NO: 48 - DNA, 30 bp, Artificial sequence
  oligonucleotide
ccagaaactctctagactggaatacacttc

SEQ ID NO: 49 - DNA, 35 bp, Artificial sequence
  oligonucleotide
gttactgaatcatcgcaaaacgaatgctggtgttc

SEQ ID NO: 50 - DNA, 35 bp, Artificial sequence
  oligonucleotide
gaacaccagcattcgttttgcgatgattcagtaac

SEQ ID NO: 51 - DNA, 35 bp, Artificial sequence
  oligonucleotide
gttactgaatcattacaaaacgaatgctggtgttc

SEQ ID NO: 52 - DNA, 35 bp, Artificial sequence
  oligonucleotide
gaacaccagcattcgttttgtaatgattcagtaac

SEQ ID NO: 53 - DNA, 32 bp, Artificial sequence
  oligonucleotide
gattgcctcttttgtacacacttcctcgtatg

SEQ ID NO: 54 - DNA, 32 bp, Artificial sequence
  oligonucleotide
catacgaggaagtgtgtacaaaagaggcaatc

SEQ ID NO: 55 - DNA, 33 bp, Artificial sequence
  oligonucleotide
ctaataagctcccgacgtccagtactggaaatg

SEQ ID NO: 56 - DNA, 33 bp, Artificial sequence
  oligonucleotide
catttccagtactggacgtcgggagcttattag

SEQ ID NO: 57 - DNA, 31 bp, Artificial sequence
  oligonucleotide
ctttaatggcccaaaccggttgtttcgtacc

SEQ ID NO: 58 - DNA, 31 bp, Artificial sequence
  oligonucleotide
ggtacgaaacaaccggtttgggccattaaag

SEQ ID NO: 59 - DNA, 33 bp, Artificial sequence
  oligonucleotide
ctttaatggcccaaatccgctgtttcgtacctt

SEQ ID NO: 60 - DNA, 33 bp, Artificial sequence
  oligonucleotide
aaggtacgaaacagcggatttgggccattaaag

SEQ ID NO: 61 - DNA, 33 bp, Artificial sequence
  oligonucleotide
gttgtttcgtacctcgagaagaagctgaaatag

SEQ ID NO: 62 - DNA, 33 bp, Artificial sequence
  oligonucleotide
ctatttcagcttcttctcgaggtacgaaacaac

SEQ ID NO: 63 - DNA, 33 bp, Artificial sequence
  oligonucleotide
gattattgtagatgagctcaggcgtggtactag

SEQ ID NO: 64 - DNA, 33 bp, Artificial sequence
  oligonucleotide
ctagtaccacgcctgagctcatctacaataatc

SEQ ID NO: 65 - DNA, 34 bp, Artificial sequence
  oligonucleotide
caattgctgaacatgtcgcgagtaagattggatg

SEQ ID NO: 66 - DNA, 34 bp, Artificial sequence
  oligonucleotide
catccaatcttactcgcgacatgttcagcaattg

SEQ ID NO: 67 - DNA, 36 bp, Artificial sequence
  oligonucleotide
gaattatattaaaaccatctagacatgcttgtgttg

SEQ ID NO: 68 - DNA, 36 bp, Artificial sequence
  oligonucleotide
caacacaagcatgtctagatggttttaatataattc

SEQ ID NO: 69 - DNA, 29 bp, Artificial sequence
  oligonucleotide
gaagttcaagataaaattgcatttattcc

SEQ ID NO: 70 - DNA, 29 bp, Artificial sequence
  oligonucleotide
ggaataaatgcaattttatcttgaacttc

SEQ ID NO: 71 - DNA, 31 bp, Artificial sequence
  oligonucleotide
cctaatgacgtccactttgaaaaagataaac

SEQ ID NO: 72 - DNA, 31 bp, Artificial sequence
  oligonucleotide
gtttatctttttcaaagtggacgtcattagg

SEQ ID NO: 73 - DNA, 31 bp, Artificial sequence
  oligonucleotide
ccacgttcatggccgaagtgttggaaactgc

SEQ ID NO: 74 - DNA, 31 bp, Artificial sequence
  oligonucleotide
gcagtttccaacacttcggccatgaacgtgg

SEQ ID NO: 75 - protein, 964 aa, Saccharomyces cerevisiae
MSSTRPELKFSDVSEERNFYKKYTGLPKKPLKTIRLVDKGDYYTVIGSDAIFVADSVYHTQSVLKNCQLDPVTAKNFHEPTKYVTVSLQVLATLLKLCLLDLGYKVEIYDKGWKLIKSASPGNIEQVNELMNMNIDSSIIIASLKVQWNSQDGNCIIGVAFIDTTAYKVGMLDIVDNEVYSSLESFLIQLGVKECLVQDLTSNSNSNAEMQKVINVIDRCGCVVTLLKNSEFSEKDVELDLTKLLGDDLALSLPQKYSKLSMGACNALIGYLQLLSEQDQVGKYELVEHKLKEFMKLDASAIKALNLFPQGPQNPFGSNNLAVSGFTSAGNSGKVTSLFQLLNHCKTNAGVRLLNEWLKQPLTNIDEINKRHDLVDYLIDQIELRQMLTSEYLPMIPDIRRLTKKLNKRGNLEDVLKIYQFSKRIPEIVQVFTSFLEDDSPTEPVNELVRSVWLAPLSHHVEPLSKFEEMVETTVDLDAYEENNEFMIKVEFNEELGKIRSKLDTLRDEIHSIHLDSAEDLGFDPDKKLKLENHHLHGWCMRLTRNDAKELRKHKKYIELSTVKAGIFFSTKQLKSIANETNILQKEYDKQQSALVREIINITLTYTPVFEKLSLVLAHLDVIASFAHTSSYAPIPYIRPKLHPMDSERRTHLISSRHPVLEMQDDISFISNDVTLESGKGDFLIITGPNMGGKSTYIRQVGVISLMAQIGCFVPCEEAEIAIVDAILCRVGAGDSQLKGVSTFMVEILETASILKNASKNSLIIVDELGRGTSTYDGFGLAWAIAEHIASKIGCFALFATHFHELTELSEKLPNVKNMHVVAHIEKNLKEQKHDDEDITLLYKVEPGISDQSFGIHVAEVVQFPEKIVKMAKRKANELDDLKTNNEDLKKAKLSLQEVNEGNIRLKALLKEWIRKVKEEGLHDPSKITEEASQHKIQELLRAIANEPEKENDNYLKYIKALLL

SEQ ID NO: 76 - protein, 964 aa, Saccharomyces cerevisiae
MSSTRPELKFSDVSEERNFYKKYTGLPKKPLKTIRLVDKGDYYTVIGSDAIFVADSVYHTQSVLKNCQLDPVTAKNFHEPTKYVTVSLQVLATLLKLCLLDLGYKVEIYDKGWKLIKSASPGNIEQVNELMNMNIDSSIIIASLKVQWNSQDGNCIIGVAFIDTTAYKVGMLDIVDNEVYSNLESFLIQLGVKECLVQDLTSNSNSNAEMQKVINVIDRCGCVVTLLKNSEFSEKDVELDLTKLLGDDLALSLPQKYSKLSMGACNALIGYLQLLSEQDQVGKYELVEHKLKEFMKLDASAIKALNLFPQGPQNPFGSNNLAVSGFTSAGNSGKVTSLFQLLNHRKTNAGVRLLNEWLKQPLTNIDEINKRHDLVDYLIDQIELRQMLTSEYLPMIPDIRRLTKKLNKRGNLEDVLKIYQFSKRIPEIVQVFTSFLEDDSPTEPVNELVRSVWLAPLSHHVEPLSKFEEMVETTVDLDAYEENNEFMIKVEFNEELGKIRSKLDTLRDEIHSIHLDSAEDLGFDPDKKLKLENHHLHGWCMRLTRNDAKELRKHKKYIELSTVKAGIFFSTKQLKSIANETNILQKEYDKQQSALVREIINITLTYTPVFEKLSLVLAHLDVIASFAHTSSYAPIPYIRPKLHPMDSERRTHLISSRHPVLEMQDDISFISNDVTLESGKGDFLIITGPNMGGKSTYIRQVGVISLMAQIGCFVPCEEAEIAIVDAILCRVGAGDSQLKGVSTFMVEILETASILKNASKNSLIIVDELGRGTSTYDGFGLAWAIAEHIASKIGCFALFATHFHELTELSEKLPNVKNMHVVAHIEKNLKEQKHDDEDITLLYKVEPGISDQSFGIHVAEVVQFPEKIVKMAKRKANELDDLKTNNEDLKKAKLSLQEVNEGNIRLKALLKEWIRKVKEEGLHDPSKITEEASQHKIQELLRAIANEPEKENDNYLKYIKALLL

SEQ ID NO: 77 - protein, 964 aa, Saccharomyces cerevisiae
MSSTRPELKFSDVSEERNFYKKYTGLPKKPLKTIRLVDKGDYYTVIGSDAIFVADSVYHTQSVLKNCQLDPVTAKNFHEPTKYVTVSLQVLATLLKLCLLDLGYKVEIYDKGWKLIKSASPGNIEQVNELMNMNIDSSIIIASLKVQWNSQDGNCIIGVAFIDTTAYKVGMLDIVDNEVYSNLESFLIQLGVKECLVQDLTSNSNSNAEMQKVINVIDRCGCVVTLLKNSEFSEKDVELDLTKLLGDDLALSLPQKYSKLSMGACNALIGYLQLLSEQDQVGKYELVEHKLKEFMKLDASAIKALNLFPQGPQNPFGSNNLAVSGFTSAGNSGKVTSLFQLLNHYKTNAGVRLLNEWLKQPLTNIDEINKRHDLVDYLIDQIELRQMLTSEYLPMIPDIRRLTKKLNKRGNLEDVLKIYQFSKRIPEIVQVFTSFLEDDSPTEPVNELVRSVWLAPLSHHVEPLSKFEEMVETTVDLDAYEENNEFMIKVEFNEELGKIRSKLDTLRDEIHSIHLDSAEDLGFDPDKKLKLENHHLHGWCMRLTRNDAKELRKHKKYIELSTVKAGIFFSTKQLKSIANETNILQKEYDKQQSALVREIINITLTYTPVFEKLSLVLAHLDVIASFAHTSSYAPIPYIRPKLHPMDSERRTHLISSRHPVLEMQDDISFISNDVTLESGKGDFLIITGPNMGGKSTYIRQVGVISLMAQIGCFVPCEEAEIAIVDAILCRVGAGDSQLKGVSTFMVEILETASILKNASKNSLIIVDELGRGTSTYDGFGLAWAIAEHIASKIGCFALFATHFHELTELSEKLPNVKNMHVVAHIEKNLKEQKHDDEDITLLYKVEPGISDQSFGIHVAEVVQFPEKIVKMAKRKANELDDLKTNNEDLKKAKLSLQEVNEGNIRLKALLKEWIRKVKEEGLHDPSKITEEASQHKIQELLRAIANEPEKENDNYLKYIKALLL

SEQ ID NO: 78 - protein, 964 aa, Saccharomyces cerevisiae
MSSTRPELKFSDVSEERNFYKKYTGLPKKPLKTIRLVDKGDYYTVIGSDAIFVADSVYHTQSVLKNCQLDPVTAKNFHEPTKYVTVSLQVLATLLKLCLLDLGYKVEIYDKGWKLIKSASPGNIEQVNELMNMNIDSSIIIASLKVQWNSQDGNCIIGVAFIDTTAYKVGMLDIVDNEVYSNLESFLIQLGVKECLVQDLTSNSNSNAEMQKVINVIDRCGCVVTLLKNSEFSEKDVELDLTKLLGDDLALSLPQKYSKLSMGACNALIGYLQLLSEQDQVGKYELVEHKLKEFMKLDASAIKALNLFPQGPQNPFGSNNLAVSGFTSAGNSGKVTSLFQLLNHCKTNAGVRLLNEWLKQPLTNIDEINKRHDLVDYLIDQIELRQMLTSEYLPMIPDIRRLTKKLNKRGNLEDVLKIYQFSKRIPEIVQVFTSFLEDDSPTEPVNELVRSVWLAPLSHHVEPLSKFEEMVETTVDLDAYEENNEFMIKVEFNEELGKIRSKLDTLRDEIHSIHLDSAEDLGFDPDKKLKLENHHLHGWCMRLTRNDAKELRKHKKYIELSTVKAGIFFSTKQLKSIANETNILQKEYDKQQSALVREIINITLTYTPVFEKLSLVLAHLDVIASFVHTSSYAPIPYIRPKLHPMDSERRTHLISSRHPVLEMQDDISFISNDVTLESGKGDFLIITGPNMGGKSTYIRQVGVISLMAQIGCFVPCEEAEIAIVDAILCRVGAGDSQLKGVSTFMVEILETASILKNASKNSLIIVDELGRGTSTYDGFGLAWAIAEHIASKIGCFALFATHFHELTELSEKLPNVKNMHVVAHIEKNLKEQKHDDEDITLLYKVEPGISDQSFGIHVAEVVQFPEKIVKMAKRKANELDDLKTNNEDLKKAKLSLQEVNEGNIRLKALLKEWIRKVKEEGLHDPSKITEEASQHKIQELLRAIANEPEKENDNYLKYIKALLL

SEQ ID NO: 79 - protein, 964 aa, Saccharomyces cerevisiae
MSSTRPELKFSDVSEERNFYKKYTGLPKKPLKTIRLVDKGDYYTVIGSDAIFVADSVYHTQSVLKNCQLDPVTAKNFHEPTKYVTVSLQVLATLLKLCLLDLGYKVEIYDKGWKLIKSASPGNIEQVNELMNMNIDSSIIIASLKVQWNSQDGNCIIGVAFIDTTAYKVGMLDIVDNEVYSNLESFLIQLGVKECLVQDLTSNSNSNAEMQKVINVIDRCGCVVTLLKNSEFSEKDVELDLTKLLGDDLALSLPQKYSKLSMGACNALIGYLQLLSEQDQVGKYELVEHKLKEFMKLDASAIKALNLFPQGPQNPFGSNNLAVSGFTSAGNSGKVTSLFQLLNHCKTNAGVRLLNEWLKQPLTNIDEINKRHDLVDYLIDQIELRQMLTSEYLPMIPDIRRLTKKLNKRGNLEDVLKIYQFSKRIPEIVQVFTSFLEDDSPTEPVNELVRSVWLAPLSHHVEPLSKFEEMVETTVDLDAYEENNEFMIKVEFNEELGKIRSKLDTLRDEIHSIHLDSAEDLGFDPDKKLKLENHHLHGWCMRLTRNDAKELRKHKKYIELSTVKAGIFFSTKQLKSIANETNILQKEYDKQQSALVREIINITLTYTPVFEKLSLVLAHLDVIASFAHTSSYAPIPYIRPKLHPMDSERRTHLISSRRPVLEMQDDISFISNDVTLESGKGDFLIITGPNMGGKSTYIRQVGVISLMAQIGCFVPCEEAEIAIVDAILCRVGAGDSQLKGVSTFMVEILETASILKNASKNSLIIVDELGRGTSTYDGFGLAWAIAEHIASKIGCFALFATHFHELTELSEKLPNVKNMHVVAHIEKNLKEQKHDDEDITLLYKVEPGISDQSFGIHVAEVVQFPEKIVKMAKRKANELDDLKTNNEDLKKAKLSLQEVNEGNIRLKALLKEWIRKVKEEGLHDPSKITEEASQHKIQELLRAIANEPEKENDNYLKYIKALLL

SEQ ID NO: 80 - protein, 1928 aa, Saccharomyces cerevisiae
MSSTRPELKFSDVSEERNFYKKYTGLPKKPLKTIRLVDKGDYYTVIGSDAIFVADSVYHTQSVLKNCQLDPVTAKNFHEPTKYVTVSLQVLATLLKLCLLDLGYKVEIYDKGWKLIKSASPGNIEQVNELMNMNIDSSIIIASLKVQWNSQDGNCIIGVAFIDTTAYKVGMLDIVDNEVYSNLESFLIQLGVKECLVQDLTSNSNSNAEMQKVINVIDRCGCVVTLLKNSEFSEKDVELDLTKLLGDDLALSLPQKYSKLSMGACNALIGYLQLLSEQDQVGKYELVEHKLKEFMKLDASAIKALNLFPQGPQNPFGSNNLAVSGFTSAGNSGKVTSLFQLLNHCKTNAGVRLLNEWLKQPLTNIDEINKRHDLVDYLIDQIELRQMLTSEYLPMIPDIRRLTKKLNKRGNLEDVLKIYQFSKRIPEIVQVFTSFLEDDSPTEPVNELVRSVWLAPLSHHVEPLSKFEEMVETTVDLDAYEENNEFMIKVEFNEELGKIRSKLDTLRDEIHSIHLDSAEDLGFDPDKKLKLENHHLHGWCMRLTRNDAKELRKHKKYIELSTVKAGIFFSTKQLKSIANETNILQKEYDKQQSALVREIINITLTYTPVFEKLSLVLAHLDVIASFAHTSSYAPIPYIRPKLHPMDSERRTHLISSRHPVLEMQDDISFISNDVTLESGKGDFLIITGPNMGGKSTYIRQVGVISLMAQTGCFVPCEEAEIAIVDAILCRVGAGDSQLKGVSTFMVEILETASILKNASKNSLIIVDELGRGTSTYDGFGLAWAIAEHIASKIGCFALFATHFHELTELSEKLPNVKNMHVVAHIEKNLKEQKHDDEDITLLYKVEPGISDQSFGIHVAEVVQFPEKIVKMAKRKANELDDLKTNNEDLKKAKLSLQEVNEGNIRLKALLKEWIRKVKEEGLHDPSKITEEASQHKIQELLRAIANEPEKENDNYLKYIKALLLMSSTRPELKFSDVSEERNFYKKYTGLPKKPLKTIRLVDKGDYYTVIGSDAIFVADSVYHTQSVLKNCQLDPVTAKNFHEPTKYVTVSLQVLATLLKLCLLDLGYKVEIYDKGWKLIKSASPGNIEQVNELMNMNIDSSIIIASLKVQWNSQDGNCIIGVAFIDTTAYKVGMLDIVDNEVYSNLESFLIQLGVKECLVQDLTSNSNSNAEMQKVINVIDRCGCVVTLLKNSEFSEKDVELDLTKLLGDDLALSLPQKYSKLSMGACNALIGYLQLLSEQDQVGKYELVEHKLKEFMKLDASAIKALNLFPQGPQNPFGSNNLAVSGFTSAGNSGKVTSLFQLLNHCKTNAGVRLLNEWLKQPLTNIDEINKRHDLVDYLIDQIELRQMLTSEYLPMIPDIRRLTKKLNKRGNLEDVLKIYQFSKRIPEIVQVFTSFLEDDSPTEPVNELVRSVWLAPLSHHVEPLSKFEEMVETTVDLDAYEENNEFMIKVEFNEELGKIRSKLDTLRDEIHSIHLDSAEDLGFDPDKKLKLENHHLHGWCMRLTRNDAKELRKHKKYIELSTVKAGIFFSTKQLKSIANETNILQKEYDKQQSALVREIINITLTYTPVFEKLSLVLAHLDVIASFAHTSSYAPIPYIRPKLHPMDSERRTHLISSRHPVLEMQDDISFISNDVTLESGKGDFLIITGPNMGGKSTYIRQVGVISLMAQIGCFVPCEEAEIAIVDAILCRVGAGDSQLKGVSTFMVEILETASILKNASKNSLIIVDELGRGTSTYDGFGLAWAIAEHIASKIGCFALFATHFHELTELSEKLPNVKNMHVVAHIEKNLKEQKHDDEDITLLYKVEPGISDQSFGIHVAEVVQFPEKIVKMAKRKANELDDLKTNNEDLKKAKLSLQEVNEGNIRLKALLKEWIRKVKEEGLHDPSKITEEASQHKIQELLRAIANEPEKENDNYLKYIKALLL

SEQ ID NO: 81 - protein, 964 aa, Saccharomyces cerevisiae
MSSTRPELKFSDVSEERNFYKKYTGLPKKPLKTIRLVDKGDYYTVIGSDAIFVADSVYHTQSVLKNCQLDPVTAKNFHEPTKYVTVSLQVLATLLKLCLLDLGYKVEIYDKGWKLIKSASPGNIEQVNELMNMNIDSSIIIASLKVQWNSQDGNCIIGVAFIDTTAYKVGMLDIVDNEVYSNLESFLIQLGVKECLVQDLTSNSNSNAEMQKVINVIDRCGCVVTLLKNSEFSEKDVELDLTKLLGDDLALSLPQKYSKLSMGACNALIGYLQLLSEQDQVGKYELVEHKLKEFMKLDASAIKALNLFPQGPQNPFGSNNLAVSGFTSAGNSGKVTSLFQLLNHCKTNAGVRLLNEWLKQPLTNIDEINKRHDLVDYLIDQIELRQMLTSEYLPMIPDIRRLTKKLNKRGNLEDVLKIYQFSKRIPEIVQVFTSFLEDDSPTEPVNELVRSVWLAPLSHHVEPLSKFEEMVETTVDLDAYEENNEFMIKVEFNEELGKIRSKLDTLRDEIHSIHLDSAEDLGFDPDKKLKLENHHLHGWCMRLTRNDAKELRKHKKYIELSTVKAGIFFSTKQLKSIANETNILQKEYDKQQSALVREIINITLTYTPVFEKLSLVLAHLDVIASFAHTSSYAPIPYIRPKLHPMDSERRTHLISSRHPVLEMQDDISFISNDVTLESGKGDFLIITGPNMGGKSTYIRQVGVISLMAQIRCFVPCEEAEIAIVDAILCRVGAGDSQLKGVSTFMVEILETASILKNASKNSLIIVDELGRGTSTYDGFGLAWAIAEHIASKIGCFALFATHFHELTELSEKLPNVKNMHVVAHIEKNLKEQKHDDEDITLLYKVEPGISDQSFGIHVAEVVQFPEKIVKMAKRKANELDDLKTNNEDLKKAKLSLQEVNEGNIRLKALLKEWIRKVKEEGLHDPSKITEEASQHKIQELLRAIANEPEKENDNYLKYIKALLL

SEQ ID NO: 82 - protein, 964 aa, Saccharomyces cerevisiae
MSSTRPELKFSDVSEERNFYKKYTGLPKKPLKTIRLVDKGDYYTVIGSDAIFVADSVYHTQSVLKNCQLDPVTAKNFHEPTKYVTVSLQVLATLLKLCLLDLGYKVEIYDKGWKLIKSASPGNIEQVNELMNMNIDSSIIIASLKVQWNSQDGNCIIGVAFIDTTAYKVGMLDIVDNEVYSNLESFLIQLGVKECLVQDLTSNSNSNAEMQKVINVIDRCGCVVTLLKNSEFSEKDVELDLTKLLGDDLALSLPQKYSKLSMGACNALIGYLQLLSEQDQVGKYELVEHKLKEFMKLDASAIKALNLFPQGPQNPFGSNNLAVSGFTSAGNSGKVTSLFQLLNHCKTNAGVRLLNEWLKQPLTNIDEINKRHDLVDYLIDQIELRQMLTSEYLPMIPDIRRLTKKLNKRGNLEDVLKIYQFSKRIPEIVQVFTSFLEDDSPTEPVNELVRSVWLAPLSHHVEPLSKFEEMVETTVDLDAYEENNEFMIKVEFNEELGKIRSKLDTLRDEIHSIHLDSAEDLGFDPDKKLKLENHHLHGWCMRLTRNDAKELRKHKKYIELSTVKAGIFFSTKQLKSIANETNILQKEYDKQQSALVREIINITLTYTPVFEKLSLVLAHLDVIASFAHTSSYAPIPYIRPKLHPMDSERRTHLISSRHPVLEMQDDISFISNDVTLESGKGDFLIITGPNMGGKSTYIRQVGVISLMAQIGCFVPREEAEIAIVDAILCRVGAGDSQLKGVSTFMVEILETASILKNASKNSLIIVDELGRGTSTYDGFGLAWAIAEHIASKIGCFALFATHFHELTELSEKLPNVKNMHVVAHIEKNLKEQKHDDEDITLLYKVEPGISDQSFGIHVAEVVQFPEKIVKMAKRKANELDDLKTNNEDLKKAKLSLQEVNEGNIRLKALLKEWIRKVKEEGLHDPSKITEEASQHKIQELLRAIANEPEKENDNYLKYIKALLL

SEQ ID NO: 83 - protein, 964 aa, Saccharomyces cerevisiae
MSSTRPELKFSDVSEERNFYKKYTGLPKKPLKTIRLVDKGDYYTVIGSDAIFVADSVYHTQSVLKNCQLDPVTAKNFHEPTKYVTVSLQVLATLLKLCLLDLGYKVEIYDKGWKLIKSASPGNIEQVNELMNMNIDSSIIIASLKVQWNSQDGNCIIGVAFIDTTAYKVGMLDIVDNEVYSNLESFLIQLGVKECLVQDLTSNSNSNAEMQKVINVIDRCGCVVTLLKNSEFSEKDVELDLTKLLGDDLALSLPQKYSKLSMGACNALIGYLQLLSEQDQVGKYELVEHKLKEFMKLDASAIKALNLFPQGPQNPFGSNNLAVSGFTSAGNSGKVTSLFQLLNHCKTNAGVRLLNEWLKQPLTNIDEINKRHDLVDYLIDQIELRQMLTSEYLPMIPDIRRLTKKLNKRGNLEDVLKIYQFSKRIPEIVQVFTSFLEDDSPTEPVNELVRSVWLAPLSHHVEPLSKFEEMVETTVDLDAYEENNEFMIKVEFNEELGKIRSKLDTLRDEIHSIHLDSAEDLGFDPDKKLKLENHHLHGWCMRLTRNDAKELRKHKKYIELSTVKAGIFFSTKQLKSIANETNILQKEYDKQQSALVREIINITLTYTPVFEKLSLVLAHLDVIASFAHTSSYAPIPYIRPKLHPMDSERRTHLISSRHPVLEMQDDISFISNDVTLESGKGDFLIITGPNMGGKSTYIRQVGVISLMAQIGCFVPCEEAEIAIVDAILCRVGAGDSQLKGVSTFMVEILETASILKNASKNSLIIVDELRRGTSTYDGFGLAWAIAEHIASKIGCFALFATHFHELTELSEKLPNVKNMHVVAHIEKNLKEQKHDDEDITLLYKVEPGISDQSFGIHVAEVVQFPEKIVKMAKRKANELDDLKTNNEDLKKAKLSLQEVNEGNIRLKALLKEWIRKVKEEGLHDPSKITEEASQHKIQELLRAIANEPEKENDNYLKYIKALLL

SEQ ID NO: 84 - protein, 964 aa, Saccharomyces cerevisiae
MSSTRPELKFSDVSEERNFYKKYTGLPKKPLKTIRLVDKGDYYTVIGSDAIFVADSVYHTQSVLKNCQLDPVTAKNFHEPTKYVTVSLQVLATLLKLCLLDLGYKVEIYDKGWKLIKSASPGNIEQVNELMNMNIDSSIIIASLKVQWNSQDGNCIIGVAFIDTTAYKVGMLDIVDNEVYSNLESFLIQLGVKECLVQDLTSNSNSNAEMQKVINVIDRCGCVVTLLKNSEFSEKDVELDLTKLLGDDLALSLPQKYSKLSMGACNALIGYLQLLSEQDQVGKYELVEHKLKEFMKLDASAIKALNLFPQGPQNPFGSNNLAVSGFTSAGNSGKVTSLFQLLNHCKTNAGVRLLNEWLKQPLTNIDEINKRHDLVDYLIDQIELRQMLTSEYLPMIPDIRRLTKKLNKRGNLEDVLKIYQFSKRIPEIVQVFTSFLEDDSPTEPVNELVRSVWLAPLSHHVEPLSKFEEMVETTVDLDAYEENNEFMIKVEFNEELGKIRSKLDTLRDEIHSIHLDSAEDLGFDPDKKLKLENHHLHGWCMRLTRNDAKELRKHKKYIELSTVKAGIFFSTKQLKSIANETNILQKEYDKQQSALVREIINITLTYTPVFEKLSLVLAHLDVIASFAHTSSYAPIPYIRPKLHPMDSERRTHLISSRHPVLEMQDDISFISNDVTLESGKGDFLIITGPNMGGKSTYIRQVGVISLMAQIGCFVPCEEAEIAIVDAILCRVGAGDSQLKGVSTFMVEILETASILKNASKNSLIIVDELGRGTSTYDGFGLAWAIAEHVASKIGCFALFATHFHELTELSEKLPNVKNMHVVAHIEKNLKEQKHDDEDITLLYKVEPGISDQSFGIHVAEVVQFPEKIVKMAKRKANELDDLKTNNEDLKKAKLSLQEVNEGNIRLKALLKEWIRKVKEEGLHDPSKITEEASQHKIQELLRAIANEPEKENDNYLKYIKALLL

SEQ ID NO: 85 - protein, 963 aa, Artificial
  hybrid human-yeast MSH2 protein with amino acid substitution
MSSTRPELKFSDVSEERNFYKKYTGLPKKPLKTIRLVDKGDYYTVIGSDAIFVADSVYHTQSVLKNCQLDPVTAKNFHEPTKYVTVSLQVLATLLKLCLLDLGYKVEIYDKGWKLIKSASPGNIEQVNELMNMNIDSSIIIASLKVQWNSQDGNCIIGVAFIDTTAYKVGMLDIVDNEVYSNLESFLIQLGVKECLVQDLTSNSNSNAEMQKVINVIDRCGCVVTLLKNSEFSEKDVELDLTKLLGDDLALSLPQKYSKLSMGACNALIGYLQLLSEQDQVGKYELVEHKLKEFMKLDASAIKALNLFPQGPQNPFGSNNLAVSGFTSAGNSGKVTSLFQLLNHCKTNAGVRLLNEWLKQPLTNIDEINKRHDLVDYLIDQIELRQMLTSEYLPMIPDIRRLTKKLNKRGNLEDVLKIYQFSKRIPEIVQVFTSFLEDDSPTEPVNELVRSVWLAPLSHHVEPLSKFEEMVETTVDLDAYEENNEFMIKVEFNEELGKIRSKLDTLRDEIHSIHLDSAEDLGFDPDKKLKLENHHLHGWCMRLTRNDAKELRKHKKYIELSTVKAGIFFSTKQLKSIANETNILQKEYDKQQSALVREIINITLTYTPVFEKLSLVLAHLDVIASFAHTSSYAPIPYIRPAILEKGQGRIILKPSRHACVEVQDEIAFIPNDVYFEKDKQMFHIITGPNMGGKSTYIRQTGVIVLMAQIGCFVPCESAEVSIVDCILARVGAGDSQLKGVSTFMAEMLETASILRSASKNSLIIVDELGRGTSTYDGFGLAWAIAEHIASKIGCFALFATHFHELTELSEKLPNVKNMHVVAHIEKNLKEQKHDDEDITLLYKVEPGISDQSFGIHVAEVVQFPEKIVKMAKRKANELDDLKTNNEDLKKAKLSLQEVNEGNIRLKALLKEWIRKVKEEGLHDPSKITEEASQHKIQELLRAIANEPEKENDNYLKYIKALLL

SEQ ID NO: 86 - protein, 963 aa, Artificial
  hybrid human-yeast MSH2 protein with amino acid substitution
MSSTRPELKFSDVSEERNFYKKYTGLPKKPLKTIRLVDKGDYYTVIGSDAIFVADSVYHTQSVLKNCQLDPVTAKNFHEPTKYVTVSLQVLATLLKLCLLDLGYKVEIYDKGWKLIKSASPGNIEQVNELMNMNIDSSIIIASLKVQWNSQDGNCIIGVAFIDTTAYKVGMLDIVDNEVYSNLESFLIQLGVKECLVQDLTSNSNSNAEMQKVINVIDRCGCVVTLLKNSEFSEKDVELDLTKLLGDDLALSLPQKYSKLSMGACNALIGYLQLLSEQDQVGKYELVEHKLKEFMKLDASAIKALNLFPQGPQNPFGSNNLAVSGFTSAGNSGKVTSLFQLLNHCKTNAGVRLLNEWLKQPLTNIDEINKRHDLVDYLIDQIELRQMLTSEYLPMIPDIRRLTKKLNKRGNLEDVLKIYQFSKRIPEIVQVFTSFLEDDSPTEPVNELVRSVWLAPLSHHVEPLSKFEEMVETTVDLDAYEENNEFMIKVEFNEELGKIRSKLDTLRDEIHSIHLDSAEDLGFDPDKKLKLENHHLHGWCMRLTRNDAKELRKHKKYIELSTVKAGIFFSTKQLKSIANETNILQKEYDKQQSALVREIINITLTYTPVFEKLSLVLAHLDVIASFAHTSSYAPIPYIRPAILEKGQGRIILKASRHACVEVQDKIAFIPNDVYFEKDKQMFHIITGPNMGGKSTYIRQTGVIVLMAQIGCFVPCESAEVSIVDCILARVGAGDSQLKGVSTFMAEMLETASILRSASKNSLIIVDELGRGTSTYDGFGLAWAIAEHIASKIGCFALFATHFHELTELSEKLPNVKNMHVVAHIEKNLKEQKHDDEDITLLYKVEPGISDQSFGIHVAEVVQFPEKIVKMAKRKANELDDLKTNNEDLKKAKLSLQEVNEGNIRLKALLKEWIRKVKEEGLHDPSKITEEASQHKIQELLRAIANEPEKENDNYLKYIKALLL

SEQ ID NO: 87 - protein, 963 aa, Artificial
  hybrid human-yeast MSH2 protein with amino acid substitution
MSSTRPELKFSDVSEERNFYKKYTGLPKKPLKTIRLVDKGDYYTVIGSDAIFVADSVYHTQSVLKNCQLDPVTAKNFHEPTKYVTVSLQVLATLLKLCLLDLGYKVEIYDKGWKLIKSASPGNIEQVNELMNMNIDSSIIIASLKVQWNSQDGNCIIGVAFIDTTAYKVGMLDIVDNEVYSNLESFLIQLGVKECLVQDLTSNSNSNAEMQKVINVIDRCGCVVTLLKNSEFSEKDVELDLTKLLGDDLALSLPQKYSKLSMGACNALIGYLQLLSEQDQVGKYELVEHKLKEFMKLDASAIKALNLFPQGPQNPFGSNNLAVSGFTSAGNSGKVTSLFQLLNHCKTNAGVRLLNEWLKQPLTNIDEINKRHDLVDYLIDQIELRQMLTSEYLPMIPDIRRLTKKLNKRGNLEDVLKIYQFSKRIPEIVQVFTSFLEDDSPTEPVNELVRSVWLAPLSHHVEPLSKFEEMVETTVDLDAYEENNEFMIKVEFNEELGKIRSKLDTLRDEIHSIHLDSAEDLGFDPDKKLKLENHHLHGWCMRLTRNDAKELRKHKKYIELSTVKAGIFFSTKQLKSIANETNILQKEYDKQQSALVREIINITLTYTPVFEKLSLVLAHLDVIASFAHTSSYAPIPYIRPAILEKGQGRIILKASRHACVEVQDEIAFIPNDVHFEKDKQMFHIITGPNMGGKSTYIRQTGVIVLMAQIGCFVPCESAEVSIVDCILARVGAGDSQLKGVSTFMAEMLETASILRSASKNSLIIVDELGRGTSTYDGFGLAWAIAEHIASKIGCFALFATHFHELTELSEKLPNVKNMHVVAHIEKNLKEQKHDDEDITLLYKVEPGISDQSFGIHVAEVVQFPEKIVKMAKRKANELDDLKTNNEDLKKAKLSLQEVNEGNIRLKALLKEWIRKVKEEGLHDPSKITEEASQHKIQELLRAIANEPEKENDNYLKYIKALLL

SEQ ID NO: 88 - protein, 963 aa, Artificial
  hybrid human-yeast MSH2 protein with amino acid substitution
MSSTRPELKFSDVSEERNFYKKYTGLPKKPLKTIRLVDKGDYYTVIGSDAIFVADSVYHTQSVLKNCQLDPVTAKNFHEPTKYVTVSLQVLATLLKLCLLDLGYKVEIYDKGWKLIKSASPGNIEQVNELMNMNIDSSIIIASLKVQWNSQDGNCIIGVAFIDTTAYKVGMLDIVDNEVYSNLESFLIQLGVKECLVQDLTSNSNSNAEMQKVINVIDRCGCVVTLLKNSEFSEKDVELDLTKLLGDDLALSLPQKYSKLSMGACNALIGYLQLLSEQDQVGKYELVEHKLKEFMKLDASAIKALNLFPQGPQNPFGSNNLAVSGFTSAGNSGKVTSLFQLLNHCKTNAGVRLLNEWLKQPLTNIDEINKRHDLVDYLIDQIELRQMLTSEYLPMIPDIRRLTKKLNKRGNLEDVLKIYQFSKRIPEIVQVFTSFLEDDSPTEPVNELVRSVWLAPLSHHVEPLSKFEEMVETTVDLDAYEENNEFMIKVEFNEELGKIRSKLDTLRDEIHSIHLDSAEDLGFDPDKKLKLENHHLHGWCMRLTRNDAKELRKHKKYIELSTVKAGIFFSTKQLKSIANETNILQKEYDKQQSALVREIINITLTYTPVFEKLSLVLAHLDVIASFAHTSSYAPIPYIRPAILEKGQGRIILKASRHACVEVQDEIAFIPNDVYFEKDKQMFHIITGPNMGGKSTYIRQTGVIVLMAQIGCFVPCESAEVSIVDCILARVGAGDSQLKGVSTFMAEVLETASILRSASKNSLIIVDELGRGTSTYDGFGLAWAIAEHIASKIGCFALFATHFHELTELSEKLPNVKNMHVVAHIEKNLKEQKHDDEDITLLYKVEPGISDQSFGIHVAEVVQFPEKIVKMAKRKANELDDLKTNNEDLKKAKLSLQEVNEGNIRLKALLKEWIRKVKEEGLHDPSKITEEASQHKIQELLRAIANEPEKENDNYLKYIKALLL

SEQ ID NO: 89 - protein, 934 aa, Homo sapiens
MAVQPKETLQLESAAEVGFVRFFQGMPEKPTTTVRLFDRGDFYTAHGEDALLAAREVFKTQGVIKYMGPAGAKNLQSVVLSKMNFESFVKDLLLVRQYRVEVYKNRAGNKASKENDWYLAYKASPGNLSQFEDILFGNNDMSASIGVVGVKMSAVDGQRQVGVGYVDSIQRKLGLCEFPDNDQFSSLEALLIQIGPKECVLPGGETAGDMGKLRQIIQRGGILITERKKADFSTKDIYQDLNRLLKGKKGEQMNSAVLPEMENQVAVSSLSAVIKFLELLSDDSNFGQFELTTFDFSQYMKLDIAAVRALNLFQGSVEDTTGSQSLAALLNKCKTPQGQRLVNQWIKQPLMDKNRIEERLNLVEAFVEDAELRQTLQEDLLRRFPDLNRLAKKFQRQAANLQDCYRLYQGINQLPNVIQALEKHEGKHQKLLLAVFVTPLTDLRSDFSKFQEMIETTLDMDQVENHEFLVKPSFDPNLSELREIMNDLEKKMQSTLISAARDLGLDPGKQIKLDSSAQFGYYFRVTCKEEKVLRNNKNFSTVDIQKNGVKFTNSKLTSLNEEYTKNKTEYEEAQDAIVKEIVNISSGYVEPMQTLNDVLAQLDAVVSFAHVSNGAPVPYVRPAILEKGQGRIILKASRHACVEVQDEIAFIPNDVYFEKDKQMFHIITGPNMGGKSTYIRQTGVIVLMAQIGCFVPCESAEVSIVDCILARVGAGDSQLKGVSTFMAEMLETASILRSATKDSLIIIDELGRGTSTYDGFGLAWAISEYIATKIGAFCMFATHFHELTALANQIPTVNNLHVTALTTEETLTMLYQVKKGVCDQSFGIHVAELANFPKHVIECAKQKALELEEFQYIGESQGYDIMEPAAKKCYLEREQGEKIIQEFLSKVKQMPFTEMSEENITIKLKQLKAEVIAKNNSFVNEIISRIKVTT

SEQ ID NO: 90 - protein, 934 aa, Homo sapiens [sequence omitted]

SEQ ID NO: 91 - protein, 934 aa, Homo sapiens [sequence omitted]

SEQ ID NO: 92 - protein, 934 aa, Homo sapiens
MAVQPKETLQLESAAEVGFVRFFQGMPEKPTTTVRLFDRGDFYTAHGEDALLAAREVFKTQGVIKYMGPAGAKNLQSVVLSKMNFESFVKDLLLVRQYRVEVYKNRAGNKASKENDWYLAYKASPGNLSQFEDILFGNNDMSASIGVVGVKMSAVDGQRQVGVGYVDSIQRKLGLCEFPDNDQFSNLEALLIQIGPKECVLPGGETAGDMGKLRQIIQRGGILITERKKADFSTKDIYQDLNRLLKGKKGEQMNSAVLPEMENQVAVSSLSAVIKFLELLSDDSNFGQFELTTFDFSQYMKLDIAAVRALNLFQGSVEDTTGSQSLAALLNKCKTPQGQRLVNQWIKQPLMDKNRIEERLNLVEAFVEDAELRQTLQEDLLRRFPDLNRLAKKFQRQAANLQDCYRLYQGINQLPNVIQALEKHEGKHQKLLLAVFVTPLTDLRSDFSKFQEMIETTLDMDQVENHEFLVKPSFDPNLSELREIMNDLEKKMQSTLISAARDLGLDPGKQIKLDSSAQFGYYFRVTCKEEKVLRNNKNFSTVDIQKNGVKFTNSKLTSLNEEYTKNKTEYEEAQDAIVKEIVNISSGYVEPMQTLNDVLAQLDAVVSFVHVSNGAPVPYVRPAILEKGQGRIILKASRHACVEVQDEIAFIPNDVYFEKDKQMFHIITGPNMGGKSTYIRQTGVIVLMAQIGCFVPCESAEVSIVDCILARVGAGDSQLKGVSTFMAEMLETASILRSATKDSLIIIDELGRGTSTYDGFGLAWAISEYIATKIGAFCMFATHFHELTALANQIPTVNNLHVTALTTEETLTMLYQVKKGVCDQSFGIHVAELANFPKHVIECAKQKALELEEFQYIGESQGYDIMEPAAKKCYLEREQGEKIIQEFLSKVKQMPFTEMSEENITIKLKQLKAEVIAKNNSFVNEIISRIKVTT

SEQ ID NO: 93 - protein, 934 aa, Homo sapiens
MAVQPKETLQLESAAEVGFVRFFQGMPEKPTTTVRLFDRGDFYTAHGEDALLAAREVFKTQGVIKYMGPAGAKNLQSVVLSKMNFESFVKDLLLVRQYRVEVYKNRAGNKASKENDWYLAYKASPGNLSQFEDILFGNNDMSASIGVVGVKMSAVDGQRQVGVGYVDSIQRKLGLCEFPDNDQFSNLEALLIQIGPKECVLPGGETAGDMGKLRQIIQRGGILITERKKADFSTKDIYQDLNRLLKGKKGEQMNSAVLPEMENQVAVSSLSAVIKFLELLSDDSNFGQFELTTFDFSQYMKLDIAAVRALNLFQGSVEDTTGSQSLAALLNKCKTPQGQRLVNQWIKQPLMDKNRIEERLNLVEAFVEDAELRQTLQEDLLRRFPDLNRLAKKFQRQAANLQDCYRLYQGINQLPNVIQALEKHEGKHQKLLLAVFVTPLTDLRSDFSKFQEMIETTLDMDQVENHEFLVKPSFDPNLSELREIMNDLEKKMQSTLISAARDLGLDPGKQIKLDSSAQFGYYFRVTCKEEKVLRNNKNFSTVDIQKNGVKFTNSKLTSLNEEYTKNKTEYEEAQDAIVKEIVNISSGYVEPMQTLNDVLAQLDAVVSFAHVSNGAPVPYVRPAILEKGQGRIILKASRRACVEVQDEIAFIPNDVYFEKDKQMFHIITGPNMGGKSTYIRQTGVIVLMAQIGCFVPCESAEVSIVDCILARVGAGDSQLKGVSTFMAEMLETASILRSATKDSLIIIDELGRGTSTYDGFGLAWAISEYIATKIGAFCMFATHFHELTALANQIPTVNNLHVTALTTEETLTMLYQVKKGVCDQSFGIHVAELANFPKHVIECAKQKALELEEFQYIGESQGYDIMEPAAKKCYLEREQGEKIIQEFLSKVKQMPFTEMSEENITIKLKQLKAEVIAKNNSFVNEIISRIKVTT

SEQ ID NO: 94 - protein, 934 aa, Homo sapiens
MAVQPKETLQLESAAEVGFVRFFQGMPEKPTTTVRLFDRGDFYTAHGEDALLAAREVFKTQGVIKYMGPAGAKNLQSVVLSKMNFESFVKDLLLVRQYRVEVYKNRAGNKASKENDWYLAYKASPGNLSQFEDILFGNNDMSASIGVVGVKMSAVDGQRQVGVGYVDSIQRKLGLCEFPDNDQFSNLEALLIQIGPKECVLPGGETAGDMGKLRQIIQRGGILITERKKADFSTKDIYQDLNRLLKGKKGEQMNSAVLPEMENQVAVSSLSAVIKFLELLSDDSNFGQFELTTFDFSQYMKLDIAAVRALNLFQGSVEDTTGSQSLAALLNKCKTPQGQRLVNQWIKQPLMDKNRIEERLNLVEAFVEDAELRQTLQEDLLRRFPDLNRLAKKFQRQAANLQDCYRLYQGINQLPNVIQALEKHEGKHQKLLLAVFVTPLTDLRSDFSKFQEMIETTLDMDQVENHEFLVKPSFDPNLSELREIMNDLEKKMQSTLISAARDLGLDPGKQIKLDSSAQFGYYFRVTCKEEKVLRNNKNFSTVDIQKNGVKFTNSKLTSLNEEYTKNKTEYEEAQDAIVKEIVNISSGYVEPMQTLNDVLAQLDAVVSFAHVSNGAPVPYVRPAILEKGQGRIILKASRHACVEVQDEIAFIPNDVYFEKDKQMFHIITGPNMGGKSTYIRQTGVIVLMAQTGCFVPCESAEVSIVDCILARVGAGDSQLKGVSTFMAEMLETASILRSATKDSLIIIDELGRGTSTYDGFGLAWAISEYIATKIGAFCMFATHFHELTALANQIPTVNNLHVTALTTEETLTMLYQVKKGVCDQSFGIHVAELANFPKHVIECAKQKALELEEFQYIGESQGYDIMEPAAKKCYLEREQGEKIIQEFLSKVKQMPFTEMSEENITIKLKQLKAEVIAKNNSFVNEIISRIKVTT

SEQ ID NO: 95 - protein, 934 aa, Homo sapiens [sequence omitted]

SEQ ID NO: 96 - protein, 934 aa, Homo sapiens [sequence omitted]

SEQ ID NO: 97 - protein, 934 aa, Homo sapiens [sequence omitted]

SEQ ID NO: 98 - protein, 934 aa, Homo sapiens
MAVQPKETLQLESAAEVGFVRFFQGMPEKPTTTVRLFDRGDFYTAHGEDALLAAREVFKTQGVIKYMGPAGAKNLQSVVLSKMNFESFVKDLLLVRQYRVEVYKNRAGNKASKENDWYLAYKASPGNLSQFEDILFGNNDMSASIGVVGVKMSAVDGQRQVGVGYVDSIQRKLGLCEFPDNDQFSNLEALLIQIGPKECVLPGGETAGDMGKLRQIIQRGGILITERKKADFSTKDIYQDLNRLLKGKKGEQMNSAVLPEMENQVAVSSLSAVIKFLELLSDDSNFGQFELTTFDFSQYMKLDIAAVRALNLFQGSVEDTTGSQSLAALLNKCKTPQGQRLVNQWIKQPLMDKNRIEERLNLVEAFVEDAELRQTLQEDLLRRFPDLNRLAKKFQRQAANLQDCYRLYQGINQLPNVIQALEKHEGKHQKLLLAVFVTPLTDLRSDFSKFQEMIETTLDMDQVENHEFLVKPSFDPNLSELREIMNDLEKKMQSTLISAARDLGLDPGKQIKLDSSAQFGYYFRVTCKEEKVLRNNKNFSTVDIQKNGVKFTNSKLTSLNEEYTKNKTEYEEAQDAIVKEIVNISSGYVEPMQTLNDVLAQLDAVVSFAHVSNGAPVPYVRPAILEKGQGRIILKASRHACVEVQDEIAFIPNDVYFEKDKQMFHIITGPNMGGKSTYIRQTGVIVLMAQIGCFVPCESAEVSIVDCILARVGAGDSQLKGVSTFMAEMLETASILRSATKDSLIIIDELGRGTSTYDGFGLAWAISEYVATKIGAFCMFATHFHELTALANQIPTVNNLHVTALTTEETLTMLYQVKKGVCDQSFGIHVAELANFPKHVIECAKQKALELEEFQYIGESQGYDIMEPAAKKCYLEREQGEKIIQEFLSKVKQMPFTEMSEENITIKLKQLKAEVIAKNNSFVNEIISRIKVTT

SEQ ID NO: 99 - protein, 934 aa, Homo sapiens [sequence omitted]

SEQ ID NO: 100 - protein, 934 aa, Homo sapiens [sequence omitted]

SEQ ID NO: 101 - protein, 934 aa, Homo sapiens
MAVQPKETLQLESAAEVGFVRFFQGMPEKPTTTVRLFDRGDFYTAHGEDALLAAREVFKTQGVIKYMGPAGAKNLQSVVLSKMNFESFVKDLLLVRQYRVEVYKNRAGNKASKENDWYLAYKASPGNLSQFEDILFGNNDMSASIGVVGVKMSAVDGQRQVGVGYVDSIQRKLGLCEFPDNDQFSNLEALLIQIGPKECVLPGGETAGDMGKLRQIIQRGGILITERKKADFSTKDIYQDLNRLLKGKKGEQMNSAVLPEMENQVAVSSLSAVIKFLELLSDDSNFGQFELTTFDFSQYMKLDIAAVRALNLFQGSVEDTTGSQSLAALLNKCKTPQGQRLVNQWIKQPLMDKNRIEERLNLVEAFVEDAELRQTLQEDLLRRFPDLNRLAKKFQRQAANLQDCYRLYQGINQLPNVIQALEKHEGKHQKLLLAVFVTPLTDLRSDFSKFQEMIETTLDMDQVENHEFLVKPSFDPNLSELREIMNDLEKKMQSTLISAARDLGLDPGKQIKLDSSAQFGYYFRVTCKEEKVLRNNKNFSTVDIQKNGVKFTNSKLTSLNEEYTKNKTEYEEAQDAIVKEIVNISSGYVEPMQTLNDVLAQLDAVVSFAHVSNGAPVPYVRPAILEKGQGRIILKASRHACVEVQDEIAFIPNDVHFEKDKQMFHIITGPNMGGKSTYIRQTGVIVLMAQIGCFVPCESAEVSIVDCILARVGAGDSQLKGVSTFMAEMLETASILRSATKDSLIIIDELGRGTSTYDGFGLAWAISEYIATKIGAFCMFATHFHELTALANQIPTVNNLHVTALTTEETLTMLYQVKKGVCDQSFGIHVAELANFPKHVIECAKQKALELEEFQYIGESQGYDIMEPAAKKCYLEREQGEKIIQEFLSKVKQMPFTEMSEENITIKLKQLKAEVIAKNNSFVNEIISRIKVTT

SEQ ID NO: 102 - protein, 934 aa, Homo sapiens
MAVQPKETLQLESAAEVGFVRFFQGMPEKPTTTVRLFDRGDFYTAHGEDALLAAREVFKTQGVIKYMGPAGAKNLQSVVLSKMNFESFVKDLLLVRQYRVEVYKNRAGNKASKENDWYLAYKASPGNLSQFEDILFGNNDMSASIGVVGVKMSAVDGQRQVGVGYVDSIQRKLGLCEFPDNDQFSNLEALLIQIGPKECVLPGGETAGDMGKLRQIIQRGGILITERKKADFSTKDIYQDLNRLLKGKKGEQMNSAVLPEMENQVAVSSLSAVIKFLELLSDDSNFGQFELTTFDFSQYMKLDIAAVRALNLFQGSVEDTTGSQSLAALLNKCKTPQGQRLVNQWIKQPLMDKNRIEERLNLVEAFVEDAELRQTLQEDLLRRFPDLNRLAKKFQRQAANLQDCYRLYQGINQLPNVIQALEKHEGKHQKLLLAVFVTPLTDLRSDFSKFQEMIETTLDMDQVENHEFLVKPSFDPNLSELREIMNDLEKKMQSTLISAARDLGLDPGKQIKLDSSAQFGYYFRVTCKEEKVLRNNKNFSTVDIQKNGVKFTNSKLTSLNEEYTKNKTEYEEAQDAIVKEIVNISSGYVEPMQTLNDVLAQLDAVVSFAHVSNGAPVPYVRPAILEKGQGRIILKASRHACVEVQDEIAFIPNDVYFEKDKQMFHIITGPNMGGKSTYIRQTGVIVLMAQIGCFVPCESAEVSIVDCILARVGAGDSQLKGVSTFMAEVLETASILRSATKDSLIIIDELGRGTSTYDGFGLAWAISEYIATKIGAFCMFATHFHELTALANQIPTVNNLHVTALTTEETLTMLYQVKKGVCDQSFGIHVAELANFPKHVIECAKQKALELEEFQYIGESQGYDIMEPAAKKCYLEREQGEKIIQEFLSKVKQMPFTEMSEENITIKLKQLKAEVIAKNNSFVNEIISRIKVTT

SEQ ID NO: 103 - protein, 964 aa, Artificial sequence
  hybrid human-yeast MSH2 protein
MAVQPKETLQLESAAEVGFVRFFQGMPEKPTTTVRLFDRGDFYTAHGEDALLAAREVFKTQGVLKNCQLDPVTAKNFHEPTKYVTVSLQVLATLLKLCLLDLGYKVEIYDKGWKLIKSASPGNIEQVNELMNMNIDSSIIIASLKVQWNSQDGNCIIGVAFIDTTAYKVGMLDIVDNEVYSNLESFLIQLGVKECLVQDLTSNSNSNAEMQKVINVIDRCGCVVTLLKNSEFSEKDVELDLTKLLGDDLALSLPQKYSKLSMGACNALIGYLQLLSEQDQVGKYELVEHKLKEFMKLDASAIKALNLFPQGPQNPFGSNNLAVSGFTSAGNSGKVTSLFQLLNHCKTNAGVRLLNEWLKQPLTNIDEINKRHDLVDYLIDQIELRQMLTSEYLPMIPDIRRLTKKLNKRGNLEDVLKIYQFSKRIPEIVQVFTSFLEDDSPTEPVNELVRSVWLAPLSHHVEPLSKFEEMVETTVDLDAYEENNEFMIKVEFNEELGKIRSKLDTLRDEIHSIHLDSAEDLGFDPDKKLKLENHHLHGWCMRLTRNDAKELRKHKKYIELSTVKAGIFFSTKQLKSIANETNILQKEYDKQQSALVREIINITLTYTPVFEKLSLVLAHLDVIASFAHTSSYAPIPYIRPKLHPMDSERRTHLISSRHPVLEMQDDISFISNDVTLESGKGDFLIITGPNMGGKSTYIRQVGVISLMAQIGCFVPCEEAEIAIVDAILCRVGAGDSQLKGVSTFMVEILETASILKNASKNSLIIVDELGRGTSTYDGFGLAWAIAEHIASKIGCFALFATHFHELTELSEKLPNVKNMHVVAHIEKNLKEQKHDDEDITLLYKVEPGISDQSFGIHVAEVVQFPEKIVKMAKRKANELDDLKTNNEDLKKAKLSLQEVNEGNIRLKALLKEWIRKVKEEGLHDPSKITEEASQHKIQELLRAIANEPEKENDNYLKYIKALLL

SEQ ID NO: 104 - protein, 963 aa, Artificial sequence
  hybrid human-yeast MSH2 protein
MSSTRPELKFSDVSEERNFYKKYTGLPKKPLKTIRLVDKGDYYTVIGSDAIFVADSVYHTQSVLKNCQLDPVTAKNFHEPTKYVTVSLQVLATLLKLCLLDLGYKVEIYDKGWKLIKSASPGNIEQVNELMNMNIDSSIIIASLKVQWNSQDGNCIIGVAFIDTTAYKVGMLDIVDNEVYSNLESFLIQLGVKECLVQDLTSNSNSNAEMQKVINVIDRCGCVVTLLKNSEFSEKDVELDLTKLLGDDLALSLPQKYSKLSMGACNALIGYLQLLSEQDQVGKYELVEHKLKEFMKLDASAIKALNLFPQGPQNPFGSNNLAVSGFTSAGNSGKVTSLFQLLNHCKTNAGVRLLNEWLKQPLTNIDEINKRHDLVDYLIDQIELRQMLTSEYLPMIPDIRRLTKKLNKRGNLEDVLKIYQFSKRIPEIVQVFTSFLEDDSPTEPVNELVRSVWLAPLSHHVEPLSKFEEMVETTVDLDAYEENNEFMIKVEFNEELGKIRSKLDTLRDEIHSIHLDSAEDLGFDPDKKLKLENHHLHGWCMRLTRNDAKELRKHKKYIELSTVKAGIFFSTKQLKSIANETNILQKEYDKQQSALVREIINITLTYTPVFEKLSLVLAHLDVIASFAHTSSYAPIPYIRPAILEKGQGRIILKASRHACVEVQDEIAFIPNDVYFEKDKQMFHIITGPNMGGKSTYIRQTGVIVLMAQIGCFVPCESAEVSIVDCILARVGAGDSQLKGVSTFMAEMLETASILRSASKNSLIIVDELGRGTSTYDGFGLAWAIAEHIASKIGCFALFATHFHELTELSEKLPNVKNMHVVAHIEKNLKEQKHDDEDITLLYKVEPGISDQSFGIHVAEVVQFPEKIVKMAKRKANELDDLKTNNEDLKKAKLSLQEVNEGNIRLKALLKEWIRKVKEEGLHDPSKITEEASQHKIQELLRAIANEPEKENDNYLKYIKALLL

SEQ ID NO: 105 - DNA, 34 bp, Artificial sequence
  oligonucleotide for making site-directed mutation in yeast MLH1 g ene
ctgtatcgatgcaaaaatgacaagtattcaagtg

SEQ ID NO: 106 - DNA, 34 bp, Artificial sequence
  oligonucleotide for making site-directed mutation in yeast MLH1 g ene
ctgtatcgatgcaaaaaacacaagtattcaagtg

SEQ ID NO: 107 - DNA, 34 bp, Artificial sequence
  oligonucleotide for making site-directed mutation in yeast MLH1 g ene
ctgtatcgatgcaaaaaagacaagtattcaagtg

SEQ ID NO: 108 - DNA, 34 bp, Artificial sequence
  oligonucleotide for making site-directed mutation in yeast MLH1 g ene
ctgtatcgatgcaaaagacacaagtattcaagtg

SEQ ID NO: 109 - DNA, 34 bp, Artificial sequence
  oligonucleotide for making site-directed mutation in yeast MLH1 g ene
ctgtatcgatgcaaaagagacaagtattcaagtg

SEQ ID NO: 110 - DNA, 34 bp, Artificial sequence
  oligonucleotide for making site-directed mutation in yeast MLH1 g ene
ctgtatcgatgcaaaaggcacaagtattcaagtg

SEQ ID NO: 111 - DNA, 30 bp, Artificial sequence
  oligonucleotide
cagtttagacgtcgtgaacctttcacatac

SEQ ID NO: 112 - protein, 769 aa, Artificial sequence
  hybrid human-yeast MLH1 protein with amino acid substitution
MSLRIKALDASVVNKIAAGEIIISPVNALKEMMENSIDAKMTSIQVIVKEGGLKLIQIQDNGTGIRKEDLDIVCERFTTSKLQKFEDLSQIQTYGFRGEALASISHVARVTVTTKVKEDRCAWRVSYAEGKMLESPKPVAGKDGTTILVEDLFFNIPSRLRALRSHNDEYSKILDVVGRYAIHSKDIGFSCKKFGDSNYSLSVKPSYTVQDRIRTVFNKSVASNLITFHISKVEDLNLESVDGKVCNLNFISKKSISLIFFINNRLVTCDLLRRALNSVYSNYLPKGFRPFIYLGIVIDPAAVDVNVHPTKREVRFLSQDEIIEKIANQLHAELSAIDTSRTFKASSISTNKPESLIPFNDTIESDRNRKSLRQAQVVENSYTTANSQLRKAKRQENKLVRIDASQAKITSFLSSSQQFNFEGSSTKRQLSEPKVTNVSHSQEAEKLTLNESEQPRDANTINDNDLKDQPKKKQKLGDYKVPSIADDEKNALPISKDGYIRVPKERVNVNLTSIKKLREKVDDSIHRELTDIFANLNYVGVVDEERRLAAIQHDLKLFLIDYGSVCYELFYQIGLTDFANFGKINLQSTNVSDDIVLYNLLSEFDELNDDASKEKIISKIWDMSSMLNEYYSIELVNDGLDNDLKSVKLKSLPLLLKGYIPSLVKLPFFIYRLGKEVDWEDEQECLDGILREIALLYIPDMVPKVDTLDASLSEDEKAQFINRKEHISSLLEHVLFPCIKRRFLAPRHILKDVVEIANLPDLYKVFERC

SEQ ID NO: 113 - protein, 769 aa, Artificial sequence
  hybrid human-yeast MLH1 protein with amino acid substitution
MSLRIKALDASVVNKIAAGEIIISPVNALKEMMENSIDAKNTSIQVIVKEGGLKLIQIQDNGTGIRKEDLDIVCERFTTSKLQKFEDLSQIQTYGFRGEALASISHVARVTVTTKVKEDRCAWRVSYAEGKMLESPKPVAGKDGTTILVEDLFFNIPSRLRALRSHNDEYSKILDVVGRYAIHSKDIGFSCKKFGDSNYSLSVKPSYTVQDRIRTVFNKSVASNLITFHISKVEDLNLESVDGKVCNLNFISKKSISLIFFINNRLVTCDLLRRALNSVYSNYLPKGFRPFIYLGIVIDPAAVDVNVHPTKREVRFLSQDEIIEKIANQLHAELSAIDTSRTFKASSISTNKPESLIPFNDTIESDRNRKSLRQAQVVENSYTTANSQLRKAKRQENKLVRIDASQAKITSFLSSSQQFNFEGSSTKRQLSEPKVTNVSHSQEAEKLTLNESEQPRDANTINDNDLKDQPKKKQKLGDYKVPSIADDEKNALPISKDGYIRVPKERVNVNLTSIKKLREKVDDSIHRELTDIFANLNYVGVVDEERRLAAIQHDLKLFLIDYGSVCYELFYQIGLTDFANFGKINLQSTNVSDDIVLYNLLSEFDELNDDASKEKIISKIWDMSSMLNEYYSIELVNDGLDNDLKSVKLKSLPLLLKGYIPSLVKLPFFIYRLGKEVDWEDEQECLDGILREIALLYIPDMVPKVDTLDASLSEDEKAQFINRKEHISSLLEHVLFPCIKRRFLAPRHILKDVVEIANLPDLYKVFERC

SEQ ID NO: 114 - protein, 769 aa, Artificial sequence
  hybrid human-yeast MLH1 protein with amino acid substitution
MSLRIKALDASVVNKIAAGEIIISPVNALKEMMENSIDAKKTSIQVIVKEGGLKLIQIQDNGTGIRKEDLDIVCERFTTSKLQKFEDLSQIQTYGFRGEALASISHVARVTVTTKVKEDRCAWRVSYAEGKMLESPKPVAGKDGTTILVEDLFFNIPSRLRALRSHNDEYSKILDVVGRYAIHSKDIGFSCKKFGDSNYSLSVKPSYTVQDRIRTVFNKSVASNLITFHISKVEDLNLESVDGKVCNLNFISKKSISLIFFINNRLVTCDLLRRALNSVYSNYLPKGFRPFIYLGIVIDPAAVDVNVHPTKREVRFLSQDEIIEKIANQLHAELSAIDTSRTFKASSISTNKPESLIPFNDTIESDRNRKSLRQAQVVENSYTTANSQLRKAKRQENKLVRIDASQAKITSFLSSSQQFNFEGSSTKRQLSEPKVTNVSHSQEAEKLTLNESEQPRDANTINDNDLKDQPKKKQKLGDYKVPSIADDEKNALPISKDGYIRVPKERVNVNLTSIKKLREKVDDSIHRELTDIFANLNYVGVVDEERRLAAIQHDLKLFLIDYGSVCYELFYQIGLTDFANFGKINLQSTNVSDDIVLYNLLSEFDELNDDASKEKIISKIWDMSSMLNEYYSIELVNDGLDNDLKSVKLKSLPLLLKGYIPSLVKLPFFIYRLGKEVDWEDEQECLDGILREIALLYIPDMVPKVDTLDASLSEDEKAQFINRKEHISSLLEHVLFPCIKRRFLAPRHILKDVVEIANLPDLYKVFERC

SEQ ID NO: 115 - protein, 769 aa, Artificial sequence
  hybrid human-yeast MLH1 protein with amino acid substitution
MSLRIKALDASVVNKIAAGEIIISPVNALKEMMENSIDAKDTSIQVIVKEGGLKLIQIQDNGTGIRKEDLDIVCERFTTSKLQKFEDLSQIQTYGFRGEALASISHVARVTVTTKVKEDRCAWRVSYAEGKMLESPKPVAGKDGTTILVEDLFFNIPSRLRALRSHNDEYSKILDVVGRYAIHSKDIGFSCKKFGDSNYSLSVKPSYTVQDRIRTVFNKSVASNLITFHISKVEDLNLESVDGKVCNLNFISKKSISLIFFINNRLVTCDLLRRALNSVYSNYLPKGFRPFIYLGIVIDPAAVDVNVHPTKREVRFLSQDEIIEKIANQLHAELSAIDTSRTFKASSISTNKPESLIPFNDTIESDRNRKSLRQAQVVENSYTTANSQLRKAKRQENKLVRIDASQAKITSFLSSSQQFNFEGSSTKRQLSEPKVTNVSHSQEAEKLTLNESEQPRDANTINDNDLKDQPKKKQKLGDYKVPSIADDEKNALPISKDGYIRVPKERVNVNLTSIKKLREKVDDSIHRELTDIFANLNYVGVVDEERRLAAIQHDLKLFLIDYGSVCYELFYQIGLTDFANFGKINLQSTNVSDDIVLYNLLSEFDELNDDASKEKIISKIWDMSSMLNEYYSIELVNDGLDNDLKSVKLKSLPLLLKGYIPSLVKLPFFIYRLGKEVDWEDEQECLDGILREIALLYIPDMVPKVDTLDASLSEDEKAQFINRKEHISSLLEHVLFPCIKRRFLAPRHILKDVVEIANLPDLYKVFERC

SEQ ID NO: 116 - protein, 769 aa, Artificial sequence
  hybrid human-yeast MLH1 protein with amino acid substitution
MSLRIKALDASVVNKIAAGEIIISPVNALKEMMENSIDAKETSIQVIVKEGGLKLIQIQDNGTGIRKEDLDIVCERFTTSKLQKFEDLSQIQTYGFRGEALASISHVARVTVTTKVKEDRCAWRVSYAEGKMLESPKPVAGKDGTTILVEDLFFNIPSRLRALRSHNDEYSKILDVVGRYAIHSKDIGFSCKKFGDSNYSLSVKPSYTVQDRIRTVFNKSVASNLITFHISKVEDLNLESVDGKVCNLNFISKKSISLIFFINNRLVTCDLLRRALNSVYSNYLPKGFRPFIYLGIVIDPAAVDVNVHPTKREVRFLSQDEIIEKIANQLHAELSAIDTSRTFKASSISTNKPESLIPFNDTIESDRNRKSLRQAQVVENSYTTANSQLRKAKRQENKLVRIDASQAKITSFLSSSQQFNFEGSSTKRQLSEPKVTNVSHSQEAEKLTLNESEQPRDANTINDNDLKDQPKKKQKLGDYKVPSIADDEKNALPISKDGYIRVPKERVNVNLTSIKKLREKVDDSIHRELTDIFANLNYVGVVDEERRLAAIQHDLKLFLIDYGSVCYELFYQIGLTDFANFGKINLQSTNVSDDIVLYNLLSEFDELNDDASKEKIISKIWDMSSMLNEYYSIELVNDGLDNDLKSVKLKSLPLLLKGYIPSLVKLPFFIYRLGKEVDWEDEQECLDGILREIALLYIPDMVPKVDTLDASLSEDEKAQFINRKEHISSLLEHVLFPCIKRRFLAPRHILKDVVEIANLPDLYKVFERC

SEQ ID NO: 117 - protein, 769 aa, Artificial sequence
  hybrid human-yeast MLH1 protein with amino acid substitution
MSLRIKALDASVVNKIAAGEIIISPVNALKEMMENSIDAKGTSIQVIVKEGGLKLIQIQDNGTGIRKEDLDIVCERFTTSKLQKFEDLSQIQTYGFRGEALASISHVARVTVTTKVKEDRCAWRVSYAEGKMLESPKPVAGKDGTTILVEDLFFNIPSRLRALRSHNDEYSKILDVVGRYAIHSKDIGFSCKKFGDSNYSLSVKPSYTVQDRIRTVFNKSVASNLITFHISKVEDLNLESVDGKVCNLNFISKKSISLIFFINNRLVTCDLLRRALNSVYSNYLPKGFRPFIYLGIVIDPAAVDVNVHPTKREVRFLSQDEIIEKIANQLHAELSAIDTSRTFKASSISTNKPESLIPFNDTIESDRNRKSLRQAQVVENSYTTANSQLRKAKRQENKLVRIDASQAKITSFLSSSQQFNFEGSSTKRQLSEPKVTNVSHSQEAEKLTLNESEQPRDANTINDNDLKDQPKKKQKLGDYKVPSIADDEKNALPISKDGYIRVPKERVNVNLTSIKKLREKVDDSIHRELTDIFANLNYVGVVDEERRLAAIQHDLKLFLIDYGSVCYELFYQIGLTDFANFGKINLQSTNVSDDIVLYNLLSEFDELNDDASKEKIISKIWDMSSMLNEYYSIELVNDGLDNDLKSVKLKSLPLLLKGYIPSLVKLPFFIYRLGKEVDWEDEQECLDGILREIALLYIPDMVPKVDTLDASLSEDEKAQFINRKEHISSLLEHVLFPCIKRRFLAPRHILKDVVEIANLPDLYKVFERC

SEQ ID NO: 118 - protein, 769 aa, Artificial sequence
  hybrid human-yeast MLH1 protein
MSLRIKALDASVVNKIAAGEIIISPVNALKEMMENSIDAKSTSIQVIVKEGGLKLIQIQDNGTGIRKEDLDIVCERFTTSKLQKFEDLSQIQTYGFRGEALASISHVARVTVTTKVKEDRCAWRVSYAEGKMLESPKPVAGKDGTTILVEDLFFNIPSRLRALRSHNDEYSKILDVVGRYAIHSKDIGFSCKKFGDSNYSLSVKPSYTVQDRIRTVFNKSVASNLITFHISKVEDLNLESVDGKVCNLNFISKKSISLIFFINNRLVTCDLLRRALNSVYSNYLPKGFRPFIYLGIVIDPAAVDVNVHPTKREVRFLSQDEIIEKIANQLHAELSAIDTSRTFKASSISTNKPESLIPFNDTIESDRNRKSLRQAQVVENSYTTANSQLRKAKRQENKLVRIDASQAKITSFLSSSQQFNFEGSSTKRQLSEPKVTNVSHSQEAEKLTLNESEQPRDANTINDNDLKDQPKKKQKLGDYKVPSIADDEKNALPISKDGYIRVPKERVNVNLTSIKKLREKVDDSIHRELTDIFANLNYVGVVDEERRLAAIQHDLKLFLIDYGSVCYELFYQIGLTDFANFGKINLQSTNVSDDIVLYNLLSEFDELNDDASKEKIISKIWDMSSMLNEYYSIELVNDGLDNDLKSVKLKSLPLLLKGYIPSLVKLPFFIYRLGKEVDWEDEQECLDGILREIALLYIPDMVPKVDTLDASLSEDEKAQFINRKEHISSLLEHVLFPCIKRRFLAPRHILKDVVEIANLPDLYKVFERC

SEQ ID NO: 119 - protein, 769 aa, Artificial sequence
  hybrid human-yeast MLH1 protein
MSLRIKALDASVVNKIAAGEIIISPVNALKEMMENSIDANATMIDILVKEGGIKVLQITDNGSGINKADLPILCERFTTSKLQSFEDLASISTYGFRGEALASISHVAHVTITTKTADGKCAYRASYSDGKMLESPKPVAGKDGTTILVEDLFFNIPSRLRALRSHNDEYSKILDVVGRYAIHSKDIGFSCKKFGDSNYSLSVKPSYTVQDRIRTVFNKSVASNLITFHISKVEDLNLESVDGKVCNLNFISKKSISLIFFINNRLVTCDLLRRALNSVYSNYLPKGFRPFIYLGIVIDPAAVDVNVHPTKREVRFLSQDEIIEKIANQLHAELSAIDTSRTFKASSISTNKPESLIPFNDTIESDRNRKSLRQAQVVENSYTTANSQLRKAKRQENKLVRIDASQAKITSFLSSSQQFNFEGSSTKRQLSEPKVTNVSHSQEAEKLTLNESEQPRDANTINDNDLKDQPKKKQKLGDYKVPSIADDEKNALPISKDGYIRVPKERVNVNLTSIKKLREKVDDSIHRELTDIFANLNYVGVVDEERRLAAIQHDLKLFLIDYGSVCYELFYQIGLTDFANFGKINLQSTNVSDDIVLYNLLSEFDELNDDASKEKIISKIWDMSSMLNEYYSIELVNDGLDNDLKSVKLKSLPLLLKGYIPSLVKLPFFIYRLGKEVDWEDEQECLDGILREIALLYIPDMVPKVDTLDASLSEDEKAQFINRKEHISSLLEHVLFPCIKRRFLAPRHILKDVVEIANLPDLYKVFERC

SEQ ID NO: 120 - DNA, 34 bp, Artificial sequence
  oligonucleotide for making random mutations at codon 43 in yeast MLH1 gene
  misc_feature (14)..(16): "n" at positions 14, 15 and 16 refers to any of the four nucleoti des (a, c, g or t) at each position
ctgtatcgatgcannntccacaagtattcaagtg

SEQ ID NO: 121 - protein, 769 aa, Artificial sequence
  hybrid human-yeast MLH1 protein with amino acid substitution
MSLRIKALDASVVNKIAAGEIIISPVNALKEMMENSIDADSTSIQVIVKEGGLKLIQIQDNGTGIRKEDLDIVCERFTTSKLQKFEDLSQIQTYGFRGEALASISHVARVTVTTKVKEDRCAWRVSYAEGKMLESPKPVAGKDGTTILVEDLFFNIPSRLRALRSHNDEYSKILDVVGRYAIHSKDIGFSCKKFGDSNYSLSVKPSYTVQDRIRTVFNKSVASNLITFHISKVEDLNLESVDGKVCNLNFISKKSISLIFFINNRLVTCDLLRRALNSVYSNYLPKGFRPFIYLGIVIDPAAVDVNVHPTKREVRFLSQDEIIEKIANQLHAELSAIDTSRTFKASSISTNKPESLIPFNDTIESDRNRKSLRQAQVVENSYTTANSQLRKAKRQENKLVRIDASQAKITSFLSSSQQFNFEGSSTKRQLSEPKVTNVSHSQEAEKLTLNESEQPRDANTINDNDLKDQPKKKQKLGDYKVPSIADDEKNALPISKDGYIRVPKERVNVNLTSIKKLREKVDDSIHRELTDIFANLNYVGVVDEERRLAAIQHDLKLFLIDYGSVCYELFYQIGLTDFANFGKINLQSTNVSDDIVLYNLLSEFDELNDDASKEKIISKIWDMSSMLNEYYSIELVNDGLDNDLKSVKLKSLPLLLKGYIPSLVKLPFFIYRLGKEVDWEDEQECLDGILREIALLYIPDMVPKVDTLDASLSEDEKAQFINRKEHISSLLEHVLFPCIKRRFLAPRHILKDVVEIANLPDLYKVFERC

SEQ ID NO: 122 - protein, 769 aa, Artificial sequence
  hybrid human-yeast MLH1 protein with amino acid substitution
MSLRIKALDASVVNKIAAGEIIISPVNALKEMMENSIDAYSTSIQVIVKEGGLKLIQIQDNGTGIRKEDLDIVCERFTTSKLQKFEDLSQIQTYGFRGEALASISHVARVTVTTKVKEDRCAWRVSYAEGKMLESPKPVAGKDGTTILVEDLFFNIPSRLRALRSHNDEYSKILDVVGRYAIHSKDIGFSCKKFGDSNYSLSVKPSYTVQDRIRTVFNKSVASNLITFHISKVEDLNLESVDGKVCNLNFISKKSISLIFFINNRLVTCDLLRRALNSVYSNYLPKGFRPFIYLGIVIDPAAVDVNVHPTKREVRFLSQDEIIEKIANQLHAELSAIDTSRTFKASSISTNKPESLIPFNDTIESDRNRKSLRQAQVVENSYTTANSQLRKAKRQENKLVRIDASQAKITSFLSSSQQFNFEGSSTKRQLSEPKVTNVSHSQEAEKLTLNESEQPRDANTINDNDLKDQPKKKQKLGDYKVPSIADDEKNALPISKDGYIRVPKERVNVNLTSIKKLREKVDDSIHRELTDIFANLNYVGVVDEERRLAAIQHDLKLFLIDYGSVCYELFYQIGLTDFANFGKINLQSTNVSDDIVLYNLLSEFDELNDDASKEKIISKIWDMSSMLNEYYSIELVNDGLDNDLKSVKLKSLPLLLKGYIPSLVKLPFFIYRLGKEVDWEDEQECLDGILREIALLYIPDMVPKVDTLDASLSEDEKAQFINRKEHISSLLEHVLFPCIKRRFLAPRHILKDVVEIANLPDLYKVFERC

SEQ ID NO: 123 - protein, 769 aa, Artificial sequence
  hybrid human-yeast MLH1 protein with amino acid substitution
MSLRIKALDASVVNKIAAGEIIISPVNALKEMMENSIDAASTSIQVIVKEGGLKLIQIQDNGTGIRKEDLDIVCERFTTSKLQKFEDLSQIQTYGFRGEALASISHVARVTVTTKVKEDRCAWRVSYAEGKMLESPKPVAGKDGTTILVEDLFFNIPSRLRALRSHNDEYSKILDVVGRYAIHSKDIGFSCKKFGDSNYSLSVKPSYTVQDRIRTVFNKSVASNLITFHISKVEDLNLESVDGKVCNLNFISKKSISLIFFINNRLVTCDLLRRALNSVYSNYLPKGFRPFIYLGIVIDPAAVDVNVHPTKREVRFLSQDEIIEKIANQLHAELSAIDTSRTFKASSISTNKPESLIPFNDTIESDRNRKSLRQAQVVENSYTTANSQLRKAKRQENKLVRIDASQAKITSFLSSSQQFNFEGSSTKRQLSEPKVTNVSHSQEAEKLTLNESEQPRDANTINDNDLKDQPKKKQKLGDYKVPSIADDEKNALPISKDGYIRVPKERVNVNLTSIKKLREKVDDSIHRELTDIFANLNYVGVVDEERRLAAIQHDLKLFLIDYGSVCYELFYQIGLTDFANFGKINLQSTNVSDDIVLYNLLSEFDELNDDASKEKIISKIWDMSSMLNEYYSIELVNDGLDNDLKSVKLKSLPLLLKGYIPSLVKLPFFIYRLGKEVDWEDEQECLDGILREIALLYIPDMVPKVDTLDASLSEDEKAQFINRKEHISSLLEHVLFPCIKRRFLAPRHILKDVVEIANLPDLYKVFERC

SEQ ID NO: 124 - protein, 769 aa, Artificial sequence
  hybrid human-yeast MLH1 protein with amino acid substitution
MSLRIKALDASVVNKIAAGEIIISPVNALKEMMENSIDAMSTSIQVIVKEGGLKLIQIQDNGTGIRKEDLDIVCERFTTSKLQKFEDLSQIQTYGFRGEALASISHVARVTVTTKVKEDRCAWRVSYAEGKMLESPKPVAGKDGTTILVEDLFFNIPSRLRALRSHNDEYSKILDVVGRYAIHSKDIGFSCKKFGDSNYSLSVKPSYTVQDRIRTVFNKSVASNLITFHISKVEDLNLESVDGKVCNLNFISKKSISLIFFINNRLVTCDLLRRALNSVYSNYLPKGFRPFIYLGIVIDPAAVDVNVHPTKREVRFLSQDEIIEKIANQLHAELSAIDTSRTFKASSISTNKPESLIPFNDTIESDRNRKSLRQAQVVENSYTTANSQLRKAKRQENKLVRIDASQAKITSFLSSSQQFNFEGSSTKRQLSEPKVTNVSHSQEAEKLTLNESEQPRDANTINDNDLKDQPKKKQKLGDYKVPSIADDEKNALPISKDGYIRVPKERVNVNLTSIKKLREKVDDSIHRELTDIFANLNYVGVVDEERRLAAIQHDLKLFLIDYGSVCYELFYQIGLTDFANFGKINLQSTNVSDDIVLYNLLSEFDELNDDASKEKIISKIWDMSSMLNEYYSIELVNDGLDNDLKSVKLKSLPLLLKGYIPSLVKLPFFIYRLGKEVDWEDEQECLDGILREIALLYIPDMVPKVDTLDASLSEDEKAQFINRKEHISSLLEHVLFPCIKRRFLAPRHILKDVVEIANLPDLYKVFERC

SEQ ID NO: 125 - protein, 769 aa, Artificial sequence
  hybrid human-yeast MLH1 protein with amino acid substitution
MSLRIKALDASVVNKIAAGEIIISPVNALKEMMENSIDARSTSIQVIVKEGGLKLIQIQDNGTGIRKEDLDIVCERFTTSKLQKFEDLSQIQTYGFRGEALASISHVARVTVTTKVKEDRCAWRVSYAEGKMLESPKPVAGKDGTTILVEDLFFNIPSRLRALRSHNDEYSKILDVVGRYAIHSKDIGFSCKKFGDSNYSLSVKPSYTVQDRIRTVFNKSVASNLITFHISKVEDLNLESVDGKVCNLNFISKKSISLIFFINNRLVTCDLLRRALNSVYSNYLPKGFRPFIYLGIVIDPAAVDVNVHPTKREVRFLSQDEIIEKIANQLHAELSAIDTSRTFKASSISTNKPESLIPFNDTIESDRNRKSLRQAQVVENSYTTANSQLRKAKRQENKLVRIDASQAKITSFLSSSQQFNFEGSSTKRQLSEPKVTNVSHSQEAEKLTLNESEQPRDANTINDNDLKDQPKKKQKLGDYKVPSIADDEKNALPISKDGYIRVPKERVNVNLTSIKKLREKVDDSIHRELTDIFANLNYVGVVDEERRLAAIQHDLKLFLIDYGSVCYELFYQIGLTDFANFGKINLQSTNVSDDIVLYNLLSEFDELNDDASKEKIISKIWDMSSMLNEYYSIELVNDGLDNDLKSVKLKSLPLLLKGYIPSLVKLPFFIYRLGKEVDWEDEQECLDGILREIALLYIPDMVPKVDTLDASLSEDEKAQFINRKEHISSLLEHVLFPCIKRRFLAPRHILKDVVEIANLPDLYKVFERC

SEQ ID NO: 126 - protein, 769 aa, Artificial sequence
  hybrid human-yeast MLH1 protein with amino acid substitution
MSLRIKALDASVVNKIAAGEIIISPVNALKEMMENSIDASSTSIQVIVKEGGLKLIQIQDNGTGIRKEDLDIVCERFTTSKLQKFEDLSQIQTYGFRGEALASISHVARVTVTTKVKEDRCAWRVSYAEGKMLESPKPVAGKDGTTILVEDLFFNIPSRLRALRSHNDEYSKILDVVGRYAIHSKDIGFSCKKFGDSNYSLSVKPSYTVQDRIRTVFNKSVASNLITFHISKVEDLNLESVDGKVCNLNFISKKSISLIFFINNRLVTCDLLRRALNSVYSNYLPKGFRPFIYLGIVIDPAAVDVNVHPTKREVRFLSQDEIIEKIANQLHAELSAIDTSRTFKASSISTNKPESLIPFNDTIESDRNRKSLRQAQVVENSYTTANSQLRKAKRQENKLVRIDASQAKITSFLSSSQQFNFEGSSTKRQLSEPKVTNVSHSQEAEKLTLNESEQPRDANTINDNDLKDQPKKKQKLGDYKVPSIADDEKNALPISKDGYIRVPKERVNVNLTSIKKLREKVDDSIHRELTDIFANLNYVGVVDEERRLAAIQHDLKLFLIDYGSVCYELFYQIGLTDFANFGKINLQSTNVSDDIVLYNLLSEFDELNDDASKEKIISKIWDMSSMLNEYYSIELVNDGLDNDLKSVKLKSLPLLLKGYIPSLVKLPFFIYRLGKEVDWEDEQECLDGILREIALLYIPDMVPKVDTLDASLSEDEKAQFINRKEHISSLLEHVLFPCIKRRFLAPRHILKDVVEIANLPDLYKVFERC

SEQ ID NO: 127 - protein, 769 aa, Artificial sequence
  hybrid human-yeast MLH1 protein with amino acid substitution
MSLRIKALDASVVNKIAAGEIIISPVNALKEMMENSIDAISTSIQVIVKEGGLKLIQIQDNGTGIRKEDLDIVCERFTTSKLQKFEDLSQIQTYGFRGEALASISHVARVTVTTKVKEDRCAWRVSYAEGKMLESPKPVAGKDGTTILVEDLFFNIPSRLRALRSHNDEYSKILDVVGRYAIHSKDIGFSCKKFGDSNYSLSVKPSYTVQDRIRTVFNKSVASNLITFHISKVEDLNLESVDGKVCNLNFISKKSISLIFFINNRLVTCDLLRRALNSVYSNYLPKGFRPFIYLGIVIDPAAVDVNVHPTKREVRFLSQDEIIEKIANQLHAELSAIDTSRTFKASSISTNKPESLIPFNDTIESDRNRKSLRQAQVVENSYTTANSQLRKAKRQENKLVRIDASQAKITSFLSSSQQFNFEGSSTKRQLSEPKVTNVSHSQEAEKLTLNESEQPRDANTINDNDLKDQPKKKQKLGDYKVPSIADDEKNALPISKDGYIRVPKERVNVNLTSIKKLREKVDDSIHRELTDIFANLNYVGVVDEERRLAAIQHDLKLFLIDYGSVCYELFYQIGLTDFANFGKINLQSTNVSDDIVLYNLLSEFDELNDDASKEKIISKIWDMSSMLNEYYSIELVNDGLDNDLKSVKLKSLPLLLKGYIPSLVKLPFFIYRLGKEVDWEDEQECLDGILREIALLYIPDMVPKVDTLDASLSEDEKAQFINRKEHISSLLEHVLFPCIKRRFLAPRHILKDVVEIANLPDLYKVFERC

SEQ ID NO: 128 - protein, 769 aa, Artificial sequence
  hybrid human-yeast MLH1 protein with amino acid substitution
MSLRIKALDASVVNKIAAGEIIISPVNALKEMMENSIDALSTSIQVIVKEGGLKLIQIQDNGTGIRKEDLDIVCERFTTSKLQKFEDLSQIQTYGFRGEALASISHVARVTVTTKVKEDRCAWRVSYAEGKMLESPKPVAGKDGTTILVEDLFFNIPSRLRALRSHNDEYSKILDVVGRYAIHSKDIGFSCKKFGDSNYSLSVKPSYTVQDRIRTVFNKSVASNLITFHISKVEDLNLESVDGKVCNLNFISKKSISLIFFINNRLVTCDLLRRALNSVYSNYLPKGFRPFIYLGIVIDPAAVDVNVHPTKREVRFLSQDEIIEKIANQLHAELSAIDTSRTFKASSISTNKPESLIPFNDTIESDRNRKSLRQAQVVENSYTTANSQLRKAKRQENKLVRIDASQAKITSFLSSSQQFNFEGSSTKRQLSEPKVTNVSHSQEAEKLTLNESEQPRDANTINDNDLKDQPKKKQKLGDYKVPSIADDEKNALPISKDGYIRVPKERVNVNLTSIKKLREKVDDSIHRELTDIFANLNYVGVVDEERRLAAIQHDLKLFLIDYGSVCYELFYQIGLTDFANFGKINLQSTNVSDDIVLYNLLSEFDELNDDASKEKIISKIWDMSSMLNEYYSIELVNDGLDNDLKSVKLKSLPLLLKGYIPSLVKLPFFIYRLGKEVDWEDEQECLDGILREIALLYIPDMVPKVDTLDASLSEDEKAQFINRKEHISSLLEHVLFPCIKRRFLAPRHILKDVVEIANLPDLYKVFERC

SEQ ID NO: 129 - protein, 769 aa, Saccharomyces cerevisiae
MSLRIKALDASVVNKIAAGDIIISPVNALKEMMENSIDANATMIDILVKEGGIKVLQITDNGSGINKADLPILCERFTTSKLQKFEDLSQIQTYGFRGEALASISHVARVTVTTKVKEDRCAWRVSYAEGKMLESPKPVAGKDGTTILVEDLFFNIPSRLRALRSHNDEYSKILDVVGRYAIHSKDIGFSCKKFGDSNYSLSVKPSYTVQDRIRTVFNKSVASNLITFHISKVEDLNLESVDGKVCNLNFISKKSISLIFFINNRLVTCDLLRRALNSVYSNYLPKGFRPFIYLGIVIDPAAVDVNVHPTKREVRFLSQDEIIEKIANQLHAELSAIDTSRTFKASSISTNKPESLIPFNDTIESDRNRKSLRQAQVVENSYTTANSQLRKAKRQENKLVRIDASQAKITSFLSSSQQFNFEGSSTKRQLSEPKVTNVSHSQEAEKLTLNESEQPRDANTINDNDLKDQPKKKQKLGDYKVPSIADDEKNALPISKDGYIRVPKERVNVNLTSIKKLREKVDDSIHRELTDIFANLNYVGVVDEERRLAAIQHDLKLFLIDYGSVCYELFYQIGLTDFANFGKINLQSTNVSDDIVLYNLLSEFDELNDDASKEKIISKIWDMSSMLNEYYSIELVNDGLDNDLKSVKLKSLPLLLKGYIPSLVKLPFFIYRLGKEVDWEDEQECLDGILREIALLYIPDMVPKVDTLDASLSEDEKAQFINRKEHISSLLEHVLFPCIKRRFLAPRHILKDVVEIANLPDLYKVFERC

SEQ ID NO: 130 - protein, 769 aa, Saccharomyces cerevisiae
MSLRIKALDASVVNKIAAGEIIISPVNALKEMMENSIDANATMIDILVKEGGIKVLQITDNGSWINKADLPILCERFTTSKLQKFEDLSQIQTYGFRGEALASISHVARVTVTTKVKEDRCAWRVSYAEGKMLESPKPVAGKDGTTILVEDLFFNIPSRLRALRSHNDEYSKILDVVGRYAIHSKDIGFSCKKFGDSNYSLSVKPSYTVQDRIRTVFNKSVASNLITFHISKVEDLNLESVDGKVCNLNFISKKSISLIFFINNRLVTCDLLRRALNSVYSNYLPKGFRPFIYLGIVIDPAAVDVNVHPTKREVRFLSQDEIIEKIANQLHAELSAIDTSRTFKASSISTNKPESLIPFNDTIESDRNRKSLRQAQVVENSYTTANSQLRKAKRQENKLVRIDASQAKITSFLSSSQQFNFEGSSTKRQLSEPKVTNVSHSQEAEKLTLNESEQPRDANTINDNDLKDQPKKKQKLGDYKVPSIADDEKNALPISKDGYIRVPKERVNVNLTSIKKLREKVDDSIHRELTDIFANLNYVGVVDEERRLAAIQHDLKLFLIDYGSVCYELFYQIGLTDFANFGKINLQSTNVSDDIVLYNLLSEFDELNDDASKEKIISKIWDMSSMLNEYYSIELVNDGLDNDLKSVKLKSLPLLLKGYIPSLVKLPFFIYRLGKEVDWEDEQECLDGILREIALLYIPDMVPKVDTLDASLSEDEKAQFINRKEHISSLLEHVLFPCIKRRFLAPRHILKDVVEIANLPDLYKVFERC

SEQ ID NO: 131 - protein, 769 aa, Saccharomyces cerevisiae
MSLRIKALDASVVNKIAAGEIIISPVNALKEMMENSIDANATMIDILVKEGGIKVLQITDNGSGINKADLPILYERFTTSKLQKFEDLSQIQTYGFRGEALASISHVARVTVTTKVKEDRCAWRVSYAEGKMLESPKPVAGKDGTTILVEDLFFNIPSRLRALRSHNDEYSKILDVVGRYAIHSKDIGFSCKKFGDSNYSLSVKPSYTVQDRIRTVFNKSVASNLITFHISKVEDLNLESVDGKVCNLNFISKKSISLIFFINNRLVTCDLLRRALNSVYSNYLPKGFRPFIYLGIVIDPAAVDVNVHPTKREVRFLSQDEIIEKIANQLHAELSAIDTSRTFKASSISTNKPESLIPFNDTIESDRNRKSLRQAQVVENSYTTANSQLRKAKRQENKLVRIDASQAKITSFLSSSQQFNFEGSSTKRQLSEPKVTNVSHSQEAEKLTLNESEQPRDANTINDNDLKDQPKKKQKLGDYKVPSIADDEKNALPISKDGYIRVPKERVNVNLTSIKKLREKVDDSIHRELTDIFANLNYVGVVDEERRLAAIQHDLKLFLIDYGSVCYELFYQIGLTDFANFGKINLQSTNVSDDIVLYNLLSEFDELNDDASKEKIISKIWDMSSMLNEYYSIELVNDGLDNDLKSVKLKSLPLLLKGYIPSLVKLPFFIYRLGKEVDWEDEQECLDGILREIALLYIPDMVPKVDTLDASLSEDEKAQFINRKEHISSLLEHVLFPCIKRRFLAPRHILKDVVEIANLPDLYKVFERC

SEQ ID NO: 132 - protein, 769 aa, Saccharomyces cerevisiae
MSLRIKALDASVVNKIAAGEIIISPVNALKEMMENSIDANATMIDILVKEGGIKVLQITDNGSGINKADLPILCERFTTSKLQKFEDLSQIQTYGFPGEALASISHVARVTVTTKVKEDRCAWRVSYAEGKMLESPKPVAGKDGTTILVEDLFFNIPSRLRALRSHNDEYSKILDVVGRYAIHSKDIGFSCKKFGDSNYSLSVKPSYTVQDRIRTVFNKSVASNLITFHISKVEDLNLESVDGKVCNLNFISKKSISLIFFINNRLVTCDLLRRALNSVYSNYLPKGFRPFIYLGIVIDPAAVDVNVHPTKREVRFLSQDEIIEKIANQLHAELSAIDTSRTFKASSISTNKPESLIPFNDTIESDRNRKSLRQAQVVENSYTTANSQLRKAKRQENKLVRIDASQAKITSFLSSSQQFNFEGSSTKRQLSEPKVTNVSHSQEAEKLTLNESEQPRDANTINDNDLKDQPKKKQKLGDYKVPSIADDEKNALPISKDGYIRVPKERVNVNLTSIKKLREKVDDSIHRELTDIFANLNYVGVVDEERRLAAIQHDLKLFLIDYGSVCYELFYQIGLTDFANFGKINLQSTNVSDDIVLYNLLSEFDELNDDASKEKIISKIWDMSSMLNEYYSIELVNDGLDNDLKSVKLKSLPLLLKGYIPSLVKLPFFIYRLGKEVDWEDEQECLDGILREIALLYIPDMVPKVDTLDASLSEDEKAQFINRKEHISSLLEHVLFPCIKRRFLAPRHILKDVVEIANLPDLYKVFERC

SEQ ID NO: 133 - protein, 769 aa, Saccharomyces cerevisiae
MSLRIKALDASVVNKIAAGEIIISPVNALKEMMENSIDANATMIDILVKEGGIKVLQITDNGSGINKADLPILCERFTTSKLQKFEDLSQIQTYGFRGDALASISHVARVTVTTKVKEDRCAWRVSYAEGKMLESPKPVAGKDGTTILVEDLFFNIPSRLRALRSHNDEYSKILDVVGRYAIHSKDIGFSCKKFGDSNYSLSVKPSYTVQDRIRTVFNKSVASNLITFHISKVEDLNLESVDGKVCNLNFISKKSISLIFFINNRLVTCDLLRRALNSVYSNYLPKGFRPFIYLGIVIDPAAVDVNVHPTKREVRFLSQDEIIEKIANQLHAELSAIDTSRTFKASSISTNKPESLIPFNDTIESDRNRKSLRQAQVVENSYTTANSQLRKAKRQENKLVRIDASQAKITSFLSSSQQFNFEGSSTKRQLSEPKVTNVSHSQEAEKLTLNESEQPRDANTINDNDLKDQPKKKQKLGDYKVPSIADDEKNALPISKDGYIRVPKERVNVNLTSIKKLREKVDDSIHRELTDIFANLNYVGVVDEERRLAAIQHDLKLFLIDYGSVCYELFYQIGLTDFANFGKINLQSTNVSDDIVLYNLLSEFDELNDDASKEKIISKIWDMSSMLNEYYSIELVNDGLDNDLKSVKLKSLPLLLKGYIPSLVKLPFFIYRLGKEVDWEDEQECLDGILREIALLYIPDMVPKVDTLDASLSEDEKAQFINRKEHISSLLEHVLFPCIKRRFLAPRHILKDVVEIANLPDLYKVFERC

SEQ ID NO: 134 - protein, 769 aa, Saccharomyces cerevisiae
MSLRIKALDASVVNKIAAGEIIISPVNALKEMMENSIDANATMIDILVKEGGIKVLQITDNGSGINKADLPILCERFTTSKLQKFEDLSQIQTYGFRGEALASISHVARVTVTTKVKEDRCAWRVSYAEGKMLESPKPVAGKDGTTILVEDLFFNIPSRLRALRSHNDEYSKILDVVGGYAIHSKDIGFSCKKFGDSNYSLSVKPSYTVQDRIRTVFNKSVASNLITFHISKVEDLNLESVDGKVCNLNFISKKSISLIFFINNRLVTCDLLRRALNSVYSNYLPKGFRPFIYLGIVIDPAAVDVNVHPTKREVRFLSQDEIIEKIANQLHAELSAIDTSRTFKASSISTNKPESLIPFNDTIESDRNRKSLRQAQVVENSYTTANSQLRKAKRQENKLVRIDASQAKITSFLSSSQQFNFEGSSTKRQLSEPKVTNVSHSQEAEKLTLNESEQPRDANTINDNDLKDQPKKKQKLGDYKVPSIADDEKNALPISKDGYIRVPKERVNVNLTSIKKLREKVDDSIHRELTDIFANLNYVGVVDEERRLAAIQHDLKLFLIDYGSVCYELFYQIGLTDFANFGKINLQSTNVSDDIVLYNLLSEFDELNDDASKEKIISKIWDMSSMLNEYYSIELVNDGLDNDLKSVKLKSLPLLLKGYIPSLVKLPFFIYRLGKEVDWEDEQECLDGILREIALLYIPDMVPKVDTLDASLSEDEKAQFINRKEHISSLLEHVLFPCIKRRFLAPRHILKDVVEIANLPDLYKVFERC

SEQ ID NO: 135 - protein, 649 aa, Saccharomyces cerevisiae
CAWRVSYAEGKMLESPKPVAGKDGTTILVEDLFFNIPSRLRALRSHNDEYSKILDVVGRYAIHSKDIGFPCKKFGDSNYSLSVKPSYTVQDRIRTVFNKSVASNLITFHISKVEDLNLESVDGKVCNLNFISKKSISLIFFINNRLVTCDLLRRALNSVYSNYLPKGFRPFIYLGIVIDPAAVDVNVHPTKREVRFLSQDEIIEKIANQLHAELSAIDTSRTFKASSISTNKPESLIPFNDTIESDRNRKSLRQAQVVENSYTTANSQLRKAKRQENKLVRIDASQAKITSFLSSSQQFNFEGSSTKRQLSEPKVTNVSHSQEAEKLTLNESEQPRDANTINDNDLKDQPKKKQKLGDYKVPSIADDEKNALPISKDGYIRVPKERVNVNLTSIKKLREKVDDSIHRELTDIFANLNYVGVVDEERRLAAIQHDLKLFLIDYGSVCYELFYQIGLTDFANFGKINLQSTNVSDDIVLYNLLSEFDELNDDASKEKIISKIWDMSSMLNEYYSIELVNDGLDNDLKSVKLKSLPLLLKGYIPSLVKLPFFIYRLGKEVDWEDEQECLDGILREIALLYIPDMVPKVDTLDASLSEDEKAQFINRKEHISSLLEHVLFPCIKRRFLAPRHILKDVVEIANLPDLYKVFERC

SEQ ID NO: 136 - protein, 769 aa, Saccharomyces cerevisiae
MSLRIKALDASVVNKIAAGEIIISPVNALKEMMENSIDANATMIDILVKEGGIKVLQITDNGSGINKADLPILCERFTTSKLQKFEDLSQIQTYGFRGEALASISHVARVTVTTKVKEDRCAWRVSYAEGKMLESPKPVAGKDGTTILVEDLFFNIPSRLRALRSHNDEYSKILDVVGRYAIHSKDIGFSCKKFGDSNYSLSVKPSYTVQDRIRTVFNKSVASNLITFHISKVEDLNLESVDGKVCNLNFISKKSISLIFFINNRLVTCDLVRRALNSVYSNYLPKGFRPFIYLGIVIDPAAVDVNVHPTKREVRFLSQDEIIEKIANQLHAELSAIDTSRTFKASSISTNKPESLIPFNDTIESDRNRKSLRQAQVVENSYTTANSQLRKAKRQENKLVRIDASQAKITSFLSSSQQFNFEGSSTKRQLSEPKVTNVSHSQEAEKLTLNESEQPRDANTINDNDLKDQPKKKQKLGDYKVPSIADDEKNALPISKDGYIRVPKERVNVNLTSIKKLREKVDDSIHRELTDIFANLNYVGVVDEERRLAAIQHDLKLFLIDYGSVCYELFYQIGLTDFANFGKINLQSTNVSDDIVLYNLLSEFDELNDDASKEKIISKIWDMSSMLNEYYSIELVNDGLDNDLKSVKLKSLPLLLKGYIPSLVKLPFFIYRLGKEVDWEDEQECLDGILREIALLYIPDMVPKVDTLDASLSEDEKAQFINRKEHISSLLEHVLFPCIKRRFLAPRHILKDVVEIANLPDLYKVFERC

SEQ ID NO: 137 - protein, 769 aa, Saccharomyces cerevisiae
MSLRIKALDASVVNKIAAGEIIISPVNALKEMMENSIDANATMIDILVKEGGIKVLQITDNGSGINKADLPILCERFTTSKLQKFEDLSQIQTYGFRGEALASISHVARVTVTTKVKEDRCAWRVSYAEGKMLESPKPVAGKDGTTILVEDLFFNIPSRLRALRSHNDEYSKILDVVGRYAIHSKDIGFSCKKFGDSNYSLSVKPSYTVQDRIRTVFNKSVASNLITFHISKVEDLNLESVDGKVCNLNFISKKSISLIFFINNRLVTCDLLRRALNSVYSNYLPKGFRPFIYLGIVIDPAAVDVNVHPTKREVRFLSQDEIIEKIANQLHAELSAIDTSRTFKASSISTNKPESLIPFNDTIESDRNRKSLRQAQVVENSYTTANSQLRKAKRQENKLVRIDASQAKITSFLSSSQQFNFEGSSTKRQLSEPKVTNVSHSQETEKLTLNESEQPRDANTINDNDLKDQPKKKQKLGDYKVPSIADDEKNALPISKDGYIRVPKERVNVNLTSIKKLREKVDDSIHRELTDIFANLNYVGVVDEERRLAAIQHDLKLFLIDYGSVCYELFYQIGLTDFANFGKINLQSTNVSDDIVLYNLLSEFDELNDDASKEKIISKIWDMSSMLNEYYSIELVNDGLDNDLKSVKLKSLPLLLKGYIPSLVKLPFFIYRLGKEVDWEDEQECLDGILREIALLYIPDMVPKVDTLDASLSEDEKAQFINRKEHISSLLEHVLFPCIKRRFLAPRHILKDVVEIANLPDLYKVFERC

SEQ ID NO: 138 - protein, 769 aa, Saccharomyces cerevisiae
MSLRIKALDASVVNKIAAGEIIISPVNALKEMMENSIDANATMIDILVKEGGIKVLQITDNGSGINKADLPILCERFTTSKLQKFEDLSQIQTYGFRGEALASISHVARVTVTTKVKEDRCAWRVSYAEGKMLESPKPVAGKDGTTILVEDLFFNIPSRLRALRSHNDEYSKILDVVGRYAIHSKDIGFSCKKFGDSNYSLSVKPSYTVQDRIRTVFNKSVASNLITFHISKVEDLNLESVDGKVCNLNFISKKSISLIFFINNRLVTCDLLRRALNSVYSNYLPKGFRPFIYLGIVIDPAAVDVNVHPTKREVRFLSQDEIIEKIANQLHAELSAIDTSRTFKASSISTNKPESLIPFNDTIESDRNRKSLRQAQVVENSYTTANSQLRKAKRQENKLVRIDASQAKITSFLSSSQQFNFEGSSTKRQLSEPKVTNVSHSQEAEKLTLNESEQPRDANTINDNDLKDQPKKKQKLGDYKVPSIADDEKNALPISKDGYIRVPKERVNVNLTSIKKLREKVDDSIHRELTDIFANLNYVGVVDEERRLAAIPHDLKLFLIDYGSVCYELFYQIGLTDFANFGKINLQSTNVSDDIVLYNLLSEFDELNDDASKEKIISKIWDMSSMLNEYYSIELVNDGLDNDLKSVKLKSLPLLLKGYIPSLVKLPFFIYRLGKEVDWEDEQECLDGILREIALLYIPDMVPKVDTLDASLSEDEKAQFINRKEHISSLLEHVLFPCIKRRFLAPRHILKDVVEIANLPDLYKVFERC

SEQ ID NO: 139 - protein, 769 aa, Saccharomyces cerevisiae
MSLRIKALDASVVNKIAAGEIIISPVNALKEMMENSIDANATMIDILVKEGGIKVLQITDNGSGINKADLPILCERFTTSKLQKFEDLSQIQTYGFRGEALASISHVARVTVTTKVKEDRCAWRVSYAEGKMLESPKPVAGKDGTTILVEDLFFNIPSRLRALRSHNDEYSKILDVVGRYAIHSKDIGFSCKKFGDSNYSLSVKPSYTVQDRIRTVFNKSVASNLITFHISKVEDLNLESVDGKVCNLNFISKKSISLIFFINNRLVTCDLLRRALNSVYSNYLPKGFRPFIYLGIVIDPAAVDVNVHPTKREVRFLSQDEIIEKIANQLHAELSAIDTSRTFKASSISTNKPESLIPFNDTIESDRNRKSLRQAQVVENSYTTANSQLRKAKRQENKLVRIDASQAKITSFLSSSQQFNFEGSSTKRQLSEPKVTNVSHSQEAEKLTLNESEQPRDANTINDNDLKDQPKKKQKLGDYKVPSIADDEKNALPISKDGYIRVPKERVNVNLTSIKKLREKVDDSIHRELTDIFANLNYVGVVDEERRLAAIQHDLKLFPIDYGSVCYELFYQIGLTDFANFGKINLQSTNVSDDIVLYNLLSEFDELNDDASKEKIISKIWDMSSMLNEYYSIELVNDGLDNDLKSVKLKSLPLLLKGYIPSLVKLPFFIYRLGKEVDWEDEQECLDGILREIALLYIPDMVPKVDTLDASLSEDEKAQFINRKEHISSLLEHVLFPCIKRRFLAPRHILKDVVEIANLPDLYKVFERC

SEQ ID NO: 140 - protein, 769 aa, Saccharomyces cerevisiae
MSLRIKALDASVVNKIAAGEIIISPVNALKEMMENSIDANATMIDILVKEGGIKVLQITDNGSGINKADLPILCERFTTSKLQKFEDLSQIQTYGFRGEALASISHVARVTVTTKVKEDRCAWRVSYAEGKMLESPKPVAGKDGTTILVEDLFFNIPSRLRALRSHNDEYSKILDVVGRYAIHSKDIGFSCKKFGDSNYSLSVKPSYTVQDRIRTVFNKSVASNLITFHISKVEDLNLESVDGKVCNLNFISKKSISLIFFINNRLVTCDLLRRALNSVYSNYLPKGFRPFIYLGIVIDPAAVDVNVHPTKREVRFLSQDEIIEKIANQLHAELSAIDTSRTFKASSISTNKPESLIPFNDTIESDRNRKSLRQAQVVENSYTTANSQLRKAKRQENKLVRIDASQAKITSFLSSSQQFNFEGSSTKRQLSEPKVTNVSHSQEAEKLTLNESEQPRDANTINDNDLKDQPKKKQKLGDYKVPSIADDEKNALPISKDGYIRVPKERVNVNLTSIKKLREKVDDSIHRELTDIFANLNYVGVVDEERRLAAIQHDLKLFLIDYGSVCYELFYQIGLTDFANFGKINLQSTNVSDDIVLYNLLSEFDELNDDASKEKIISKIWDMSSMLNEYYSIELVNDGLDNDLKSVKLKSLPLLLKGYIPSLVKLPFFIYQLGKEVDWEDEQECLDGILREIALLYIPDMVPKVDTLDASLSEDEKAQFINRKEHISSLLEHVLFPCIKRRFLAPRHILKDVVEIANLPDLYKVFERC

SEQ ID NO: 141 - protein, 769 aa, Saccharomyces cerevisiae
MSLRIKALDASVVNKIAAGEIIISPVNALKEMMENSIDANATMIDILVKEGGIKVLQITDNGSGINKADLPILCERFTTSKLQKFEDLSQIQTYGFRGEALASISHVARVTVTTKVKEDRCAWRVSYAEGKMLESPKPVAGKDGTTILVEDLFFNIPSRLRALRSHNDEYSKILDVVGRYAIHSKDIGFSCKKFGDSNYSLSVKPSYTVQDRIRTVFNKSVASNLITFHISKVEDLNLESVDGKVCNLNFISKKSISLIFFINNRLVTCDLLRRALNSVYSNYLPKGFRPFIYLGIVIDPAAVDVNVHPTKREVRFLSQDEIIEKIANQLHAELSAIDTSRTFKASSISTNKPESLIPFNDTIESDRNRKSLRQAQVVENSYTTANSQLRKAKRQENKLVRIDASQAKITSFLSSSQQFNFEGSSTKRQLSEPKVTNVSHSQEAEKLTLNESEQPRDANTINDNDLKDQPKKKQKLGDYKVPSIADDEKNALPISKDGYIRVPKERVNVNLTSIKKLREKVDDSIHRELTDIFANLNYVGVVDEERRLAAIQHDLKLFLIDYGSVCYELFYQIGLTDFANFGKINLQSTNVSDDIVLYNLLSEFDELNDDASKEKIISKIWDMSSMLNEYYSIELVNDGLDNDLKSVKLKSLPLLLKGYIPSLVKLPFFIYRLGKGVDWEDEQECLDGILREIALLYIPDMVPKVDTLDASLSEDEKAQFINRKEHISSLLEHVLFPCIKRRFLAPRHILKDVVEIANLPDLYKVFERC

SEQ ID NO: 142 - protein, 769 aa, Saccharomyces cerevisiae
MSLRIKALDASVVNKIAAGEIIISPVNALKEMMENSIDANATMIDILVKEGGIKVLQITDNGSGINKADLPILCERFTTSKLQKFEDLSQIQTYGFRGEALASISHVARVTVTTKVKEDRCAWRVSYAEGKMLESPKPVAGKDGTTILVEDLFFNIPSRLRALRSHNDEYSKILDVVGRYAIHSKDIGFSCKKFGDSNYSLSVKPSYTVQDRIRTVFNKSVASNLITFHISKVEDLNLESVDGKVCNLNFISKKSISLIFFINNRLVTCDLLRRALNSVYSNYLPKGFRPFIYLGIVIDPAAVDVNVHPTKREVRFLSQDEIIEKIANQLHAELSAIDTSRTFKASSISTNKPESLIPFNDTIESDRNRKSLRQAQVVENSYTTANSQLRKAKRQENKLVRIDASQAKITSFLSSSQQFNFEGSSTKRQLSEPKVTNVSHSQEAEKLTLNESEQPRDANTINDNDLKDQPKKKQKLGDYKVPSIADDEKNALPISKDGYIRVPKERVNVNLTSIKKLREKVDDSIHRELTDIFANLNYVGVVDEERRLAAIQHDLKLFLIDYGSVCYELFYQIGLTDFANFGKINLQSTNVSDDIVLYNLLSEFDELNDDASKEKIISKIWDMSSMLNEYYSIELVNDGLDNDLKSVKLKSLPLLLKGYIPSLVKLPFFIYRLGKEVDWEDEQECLDGILREIALLYIPDMVPKVDTLDASLSEDEKAQFINRKEHISSLLEHVLFPCIKRRFLAPRHILKDVVEIANLPDLYKVFESC

SEQ ID NO: 143 - protein, 769 aa, Artificial sequence
  hybrid human-yeast MLH1 protein with amino acid substitution
MSLRIKALDASVVNKIAAGEIIISPVNALKEMMENSIDAGSTSIQVIVKEGGLKLIQIQDNGTGIRKEDLDIVCERFTTSKLQKFEDLSQIQTYGFRGEALASISHVARVTVTTKVKEDRCAWRVSYAEGKMLESPKPVAGKDGTTILVEDLFFNIPSRLRALRSHNDEYSKILDVVGRYAIHSKDIGFSCKKFGDSNYSLSVKPSYTVQDRIRTVFNKSVASNLITFHISKVEDLNLESVDGKVCNLNFISKKSISLIFFINNRLVTCDLLRRALNSVYSNYLPKGFRPFIYLGIVIDPAAVDVNVHPTKREVRFLSQDEIIEKIANQLHAELSAIDTSRTFKASSISTNKPESLIPFNDTIESDRNRKSLRQAQVVENSYTTANSQLRKAKRQENKLVRIDASQAKITSFLSSSQQFNFEGSSTKRQLSEPKVTNVSHSQEAEKLTLNESEQPRDANTINDNDLKDQPKKKQKLGDYKVPSIADDEKNALPISKDGYIRVPKERVNVNLTSIKKLREKVDDSIHRELTDIFANLNYVGVVDEERRLAAIQHDLKLFLIDYGSVCYELFYQIGLTDFANFGKINLQSTNVSDDIVLYNLLSEFDELNDDASKEKIISKIWDMSSMLNEYYSIELVNDGLDNDLKSVKLKSLPLLLKGYIPSLVKLPFFIYRLGKEVDWEDEQECLDGILREIALLYIPDMVPKVDTLDASLSEDEKAQFINRKEHISSLLEHVLFPCIKRRFLAPRHILKDVVEIANLPDLYKVFERC

SEQ ID NO: 144 - protein, 769 aa, Artificial sequence
  hybrid human-yeast MLH1 protein with amino acid substitution
MSLRIKALDASVVNKIAAGEIIISPVNALKEMMENSIDANSTSIQVIVKEGGLKLIQIQDNGTGIRKEDLDIVCERFTTSKLQKFEDLSQIQTYGFRGEALASISHVARVTVTTKVKEDRCAWRVSYAEGKMLESPKPVAGKDGTTILVEDLFFNIPSRLRALRSHNDEYSKILDVVGRYAIHSKDIGFSCKKFGDSNYSLSVKPSYTVQDRIRTVFNKSVASNLITFHISKVEDLNLESVDGKVCNLNFISKKSISLIFFINNRLVTCDLLRRALNSVYSNYLPKGFRPFIYLGIVIDPAAVDVNVHPTKREVRFLSQDEIIEKIANQLHAELSAIDTSRTFKASSISTNKPESLIPFNDTIESDRNRKSLRQAQVVENSYTTANSQLRKAKRQENKLVRIDASQAKITSFLSSSQQFNFEGSSTKRQLSEPKVTNVSHSQEAEKLTLNESEQPRDANTINDNDLKDQPKKKQKLGDYKVPSIADDEKNALPISKDGYIRVPKERVNVNLTSIKKLREKVDDSIHRELTDIFANLNYVGVVDEERRLAAIQHDLKLFLIDYGSVCYELFYQIGLTDFANFGKINLQSTNVSDDIVLYNLLSEFDELNDDASKEKIISKIWDMSSMLNEYYSIELVNDGLDNDLKSVKLKSLPLLLKGYIPSLVKLPFFIYRLGKEVDWEDEQECLDGILREIALLYIPDMVPKVDTLDASLSEDEKAQFINRKEHISSLLEHVLFPCIKRRFLAPRHILKDVVEIANLPDLYKVFERC

SEQ ID NO: 145 - protein, 769 aa, Artificial sequence
  hybrid human-yeast MLH1 protein with amino acid substitution
MSLRIKALDASVVNKIAAGEIIISPVNALKEMMENSIDAFSTSIQVIVKEGGLKLIQIQDNGTGIRKEDLDIVCERFTTSKLQKFEDLSQIQTYGFRGEALASISHVARVTVTTKVKEDRCAWRVSYAEGKMLESPKPVAGKDGTTILVEDLFFNIPSRLRALRSHNDEYSKILDVVGRYAIHSKDIGFSCKKFGDSNYSLSVKPSYTVQDRIRTVFNKSVASNLITFHISKVEDLNLESVDGKVCNLNFISKKSISLIFFINNRLVTCDLLRRALNSVYSNYLPKGFRPFIYLGIVIDPAAVDVNVHPTKREVRFLSQDEIIEKIANQLHAELSAIDTSRTFKASSISTNKPESLIPFNDTIESDRNRKSLRQAQVVENSYTTANSQLRKAKRQENKLVRIDASQAKITSFLSSSQQFNFEGSSTKRQLSEPKVTNVSHSQEAEKLTLNESEQPRDANTINDNDLKDQPKKKQKLGDYKVPSIADDEKNALPISKDGYIRVPKERVNVNLTSIKKLREKVDDSIHRELTDIFANLNYVGVVDEERRLAAIQHDLKLFLIDYGSVCYELFYQIGLTDFANFGKINLQSTNVSDDIVLYNLLSEFDELNDDASKEKIISKIWDMSSMLNEYYSIELVNDGLDNDLKSVKLKSLPLLLKGYIPSLVKLPFFIYRLGKEVDWEDEQECLDGILREIALLYIPDMVPKVDTLDASLSEDEKAQFINRKEHISSLLEHVLFPCIKRRFLAPRHILKDVVEIANLPDLYKVFERC

SEQ ID NO: 146 - protein, 769 aa, Artificial sequence
  hybrid human-yeast MLH1 protein with amino acid substitution
MSLRIKALDASVVNKIAAGEIIISPVNALKEMMENSIDAVSTSIQVIVKEGGLKLIQIQDNGTGIRKEDLDIVCERFTTSKLQKFEDLSQIQTYGFRGEALASISHVARVTVTTKVKEDRCAWRVSYAEGKMLESPKPVAGKDGTTILVEDLFFNIPSRLRALRSHNDEYSKILDVVGRYAIHSKDIGFSCKKFGDSNYSLSVKPSYTVQDRIRTVFNKSVASNLITFHISKVEDLNLESVDGKVCNLNFISKKSISLIFFINNRLVTCDLLRRALNSVYSNYLPKGFRPFIYLGIVIDPAAVDVNVHPTKREVRFLSQDEIIEKIANQLHAELSAIDTSRTFKASSISTNKPESLIPFNDTIESDRNRKSLRQAQVVENSYTTANSQLRKAKRQENKLVRIDASQAKITSFLSSSQQFNFEGSSTKRQLSEPKVTNVSHSQEAEKLTLNESEQPRDANTINDNDLKDQPKKKQKLGDYKVPSIADDEKNALPISKDGYIRVPKERVNVNLTSIKKLREKVDDSIHRELTDIFANLNYVGVVDEERRLAAIQHDLKLFLIDYGSVCYELFYQIGLTDFANFGKINLQSTNVSDDIVLYNLLSEFDELNDDASKEKIISKIWDMSSMLNEYYSIELVNDGLDNDLKSVKLKSLPLLLKGYIPSLVKLPFFIYRLGKEVDWEDEQECLDGILREIALLYIPDMVPKVDTLDASLSEDEKAQFINRKEHISSLLEHVLFPCIKRRFLAPRHILKDVVEIANLPDLYKVFERC

SEQ ID NO: 147 - protein, 769 aa, Artificial sequence
  hybrid human-yeast MLH1 protein with amino acid substitution
MSLRIKALDASVVNKIAAGEIIISPVNALKEMMENSIDATSTSIQVIVKEGGLKLIQIQDNGTGIRKEDLDIVCERFTTSKLQKFEDLSQIQTYGFRGEALASISHVARVTVTTKVKEDRCAWRVSYAEGKMLESPKPVAGKDGTTILVEDLFFNIPSRLRALRSHNDEYSKILDVVGRYAIHSKDIGFSCKKFGDSNYSLSVKPSYTVQDRIRTVFNKSVASNLITFHISKVEDLNLESVDGKVCNLNFISKKSISLIFFINNRLVTCDLLRRALNSVYSNYLPKGFRPFIYLGIVIDPAAVDVNVHPTKREVRFLSQDEIIEKIANQLHAELSAIDTSRTFKASSISTNKPESLIPFNDTIESDRNRKSLRQAQVVENSYTTANSQLRKAKRQENKLVRIDASQAKITSFLSSSQQFNFEGSSTKRQLSEPKVTNVSHSQEAEKLTLNESEQPRDANTINDNDLKDQPKKKQKLGDYKVPSIADDEKNALPISKDGYIRVPKERVNVNLTSIKKLREKVDDSIHRELTDIFANLNYVGVVDEERRLAAIQHDLKLFLIDYGSVCYELFYQIGLTDFANFGKINLQSTNVSDDIVLYNLLSEFDELNDDASKEKIISKIWDMSSMLNEYYSIELVNDGLDNDLKSVKLKSLPLLLKGYIPSLVKLPFFIYRLGKEVDWEDEQECLDGILREIALLYIPDMVPKVDTLDASLSEDEKAQFINRKEHISSLLEHVLFPCIKRRFLAPRHILKDVVEIANLPDLYKVFERC

SEQ ID NO: 148 - DNA, 32 bp, Artificial sequence
  oligonucleotide for making site-directed mutation in yeast MLH1 g ene
cttatgtgagcgagtcactacgtccaaattac

SEQ ID NO: 149 - DNA, 32 bp, Artificial sequence
  oligonucleotide for making site-directed mutation in yeast MLH1 g ene
gtaatttggacgtagtgactcgctcacataag

SEQ ID NO: 150 - DNA, 29 bp, Artificial sequence
  oligonucleotide for making site-directed mutation in yeast MLH1 g ene
ggctacattctatcactagtcaagttacc

SEQ ID NO: 151 - DNA, 29 bp, Artificial sequence
  oligonucleotide for making site-directed mutation in yeast MLH1 g ene
ggtaacttgactagtgatagaatgtagcc

SEQ ID NO: 152 - DNA, 33 bp, Artificial sequence
  oligonucleotide for making site-directed mutation in hybrid human -yeast MLH1 gene
gttatccagcggccgtctaatgctatcaaagag

SEQ ID NO: 153 - DNA, 33 bp, Artificial sequence
  oligonucleotide for making site-directed mutation in yeast MLH1 g ene
ctctttgatagcattagacggccgctggataac

SEQ ID NO: 154 - DNA, 40 bp, Artificial sequence
  oligonucleotide for making site-directed mutation in yeast MLH1 g ene
gttatccagcggccggctaatgcagtcaaagagatgattg

SEQ ID NO: 155 - DNA, 40 bp, Artificial sequence
  oligonucleotide for making site-directed mutation in yeast MLH1 g ene
caatcatctctttgactgcattagccggccgctggataac

SEQ ID NO: 156 - DNA, 35 bp, Artificial sequence
  oligonucleotide for making site-directed mutation in yeast MLH1 g ene
gtgtgcatacaggcctagttactcagatggaaaac

SEQ ID NO: 157 - DNA, 35 bp, Artificial sequence
  oligonucleotide for making site-directed mutation in yeast MLH1 g ene
gttttccatctgagtaactaggcctgtatgcacac

SEQ ID NO: 158 - DNA, 43 bp, Artificial sequence
  oligonucleotide for making site-directed mutation in yeast MLH1 g ene
cttttttacaacatagtcacgaggagaaaggctttaaaaaatc

SEQ ID NO: 159 - DNA, 43 bp, Artificial sequence
  oligonucleotide for making site-directed mutation in yeast MLH1 g ene
gattttttaaagcctttctcctcgtgactatgttgtaaaaaag

SEQ ID NO: 160 - DNA, 30 bp, Artificial sequence
  oligonucleotide
gtgtccgtggacaggattaggactgtgttc

SEQ ID NO: 161 - DNA, 18 bp, Artificial sequence
  oligonucleotide
ctcgctccttaggtactc

SEQ ID NO: 162 - DNA, 37 bp, Artificial sequence
  oligonucleotide
gtgtccacggtcgacgcattaggtttaactgataaag

SEQ ID NO: 163 - DNA, 34 bp, Artificial sequence
  oligonucleotide
atagactagtggagtcgacttccttgagaaaagc

SEQ ID NO: 164 - DNA, 42 bp, Artificial sequence
  oligonucleotide
gaaattgaagaagccttgaaagtcctggaggaattggagccc

SEQ ID NO: 165 - DNA, 23 bp, Artificial sequence
  oligonucleotide
actttcaaggcttcttcaatttc

SEQ ID NO: 166 - DNA, 34 bp, Artificial sequence
  oligonucleotide
acacccagaatgtggatgttaacgttcacccgac

SEQ ID NO: 167 - DNA, 41 bp, Artificial sequence
  oligonucleotide
gtgtccacattctgggggcttataacaattcccaaataaat

SEQ ID NO: 168 - DNA, 33 bp, Artificial sequence
  oligonucleotide for making site-directed mutation in yeast MSH2 g ene
gtctatcatactccatctgtattaaagaactgc

SEQ ID NO: 169 - DNA, 33 bp, Artificial sequence
  oligonucleotide for making site-directed mutation in yeast MSH2 g ene
gcagttctttaatacagatggagtatgatagac

SEQ ID NO: 170 - DNA, 33 bp, Artificial sequence
  oligonucleotide for making site-directed mutation in yeast MSH2 g ene
gcgcatctccaggatccattgagcaagttaatg

SEQ ID NO: 171 - DNA, 33 bp, Artificial sequence
  oligonucleotide for making site-directed mutation in yeast MSH2 g ene
cattaacttgctcaatggatcctggagatgcgc

SEQ ID NO: 172 - DNA, 33 bp, Artificial sequence
  oligonucleotide for making site-directed mutation in yeast MSH2 g ene
gttgctttcattcataccacggcatacaaggtg

SEQ ID NO: 173 - DNA, 33 bp, Artificial sequence
  oligonucleotide for making site-directed mutation in yeast MSH2 g ene
caccttgtatgccgtggtatgaatgaaagcaac

SEQ ID NO: 174 - DNA, 36 bp, Artificial sequence
  oligonucleotide for making site-directed mutation in yeast MSH2 g ene
gggtgtaaagggatgtttggtacaggacttgacatc

SEQ ID NO: 175 - DNA, 36 bp, Artificial sequence
  oligonucleotide for making site-directed mutation in yeast MSH2 g ene
gatgtcaagtcctgtaccaaacatccctttacaccc

SEQ ID NO: 176 - DNA, 36 bp, Artificial sequence
  oligonucleotide for making site-directed mutation in yeast MSH2 g ene
gggtgtaaaggaacgtttggtacaggacttgacatc

SEQ ID NO: 177 - DNA, 36 bp, Artificial sequence
  oligonucleotide for making site-directed mutation in yeast MSH2 g ene
gatgtcaagtcctgtaccaaacgttcctttacaccc

SEQ ID NO: 178 - DNA, 27 bp, Artificial sequence
  oligonucleotide for making site-directed mutation in yeast MSH2 g ene
ggtgcatgcaatgtattgattggatat

SEQ ID NO: 179 - DNA, 27 bp, Artificial sequence
  oligonucleotide for making site-directed mutation in yeast MSH2 g ene
atatccaatcaatacattgcatgcacc

SEQ ID NO: 180 - DNA, 33 bp, Artificial sequence
  oligonucleotide for making site-directed mutation in yeast MSH2 g ene
ccagatattcgaagattcactaagaaattaaat

SEQ ID NO: 181 - DNA, 33 bp, Artificial sequence
  oligonucleotide for making site-directed mutation in yeast MSH2 g ene
atttaatttcttagtgaatcttcgaatatctgg

SEQ ID NO: 182 - DNA, 33 bp, Artificial sequence
  oligonucleotide for making site-directed mutation in yeast MSH2 g ene
ccagatattcgaagagtgactaagaaattaaat

SEQ ID NO: 183 - DNA, 33 bp, Artificial sequence
  oligonucleotide for making site-directed mutation in yeast MSH2 g ene
atttaatttcttagtcactcttcgaatatctgg

SEQ ID NO: 184 - DNA, 27 bp, Artificial sequence
  oligonucleotide for making site-directed mutation in yeast MSH2 g ene
tctgctgaagatccaggattcgatccg

SEQ ID NO: 185 - DNA, 27 bp, Artificial sequence
  oligonucleotide for making site-directed mutation in yeast MSH2 g ene
cggatcgaatcctggatcttcagcaga

SEQ ID NO: 186 - DNA, 34 bp, Artificial sequence
  oligonucleotide for making site-directed mutation in yeast MSH2 g ene
catcagacaggttcgtgtgatatctttaatggcc

SEQ ID NO: 187 - DNA, 34 bp, Artificial sequence
  oligonucleotide for making site-directed mutation in yeast MSH2 g ene
ggccattaaagatatcacacgaacctgtctgatg

SEQ ID NO: 188 - DNA, 34 bp, Artificial sequence
  oligonucleotide for making site-directed mutation in yeast MSH2 g ene
catcagacaggttgttgtgatatctttaatggcc

SEQ ID NO: 189 - DNA, 34 bp, Artificial sequence
  oligonucleotide for making site-directed mutation in yeast MSH2 g ene
ggccattaaagatatcacaacaacctgtctgatg

SEQ ID NO: 190 - DNA, 35 bp, Artificial sequence
  oligonucleotide for making site-directed mutation in yeast MSH2 g ene
gttggtgtgatttcattaatagcccaaattggttg

SEQ ID NO: 191 - DNA, 35 bp, Artificial sequence
  oligonucleotide for making site-directed mutation in yeast MSH2 g ene
caaccaatttgggctattaatgaaatcacaccaac

SEQ ID NO: 192 - DNA, 34 bp, Artificial sequence
  oligonucleotide for making site-directed mutation in yeast MSH2 g ene
ggaaactgcttctgtacttaagaatgcgagtaag

SEQ ID NO: 193 - DNA, 34 bp, Artificial sequence
  oligonucleotide for making site-directed mutation in yeast MSH2 g ene
cttactcgcattcttaagtacagaagcagtttcc

SEQ ID NO: 194 - DNA, 37 bp, Artificial sequence
  oligonucleotide for making site-directed mutation in yeast MSH2 g ene
attgttaaaatggccgaacgtaaagctaatgaattgg

SEQ ID NO: 195 - DNA, 37 bp, Artificial sequence
  oligonucleotide for making site-directed mutation in yeast MSH2 g ene
ccaattcattagctttacgttcggccattttaacaat

SEQ ID NO: 196 - protein, 769 aa, Saccharomyces cerevisiae
MSLRIKALDASVVNKIAAGEIIISPVNALKEMMENSIDANATMIDILVKEGGIKVLQITDNGSGINKADLPILCERVTTSKLQKFEDLSQIQTYGFRGEALASISHVARVTVTTKVKEDRCAWRVSYAEGKMLESPKPVAGKDGTTILVEDLFFNIPSRLRALRSHNDEYSKILDVVGRYAIHSKDIGFSCKKFGDSNYSLSVKPSYTVQDRIRTVFNKSVASNLITFHISKVEDLNLESVDGKVCNLNFISKKSISLIFFINNRLVTCDLLRRALNSVYSNYLPKGFRPFIYLGIVIDPAAVDVNVHPTKREVRFLSQDEIIEKIANQLHAELSAIDTSRTFKASSISTNKPESLIPFNDTIESDRNRKSLRQAQVVENSYTTANSQLRKAKRQENKLVRIDASQAKITSFLSSSQQFNFEGSSTKRQLSEPKVTNVSHSQEAEKLTLNESEQPRDANTINDNDLKDQPKKKQKLGDYKVPSIADDEKNALPISKDGYIRVPKERVNVNLTSIKKLREKVDDSIHRELTDIFANLNYVGVVDEERRLAAIQHDLKLFLIDYGSVCYELFYQIGLTDFANFGKINLQSTNVSDDIVLYNLLSEFDELNDDASKEKIISKIWDMSSMLNEYYSIELVNDGLDNDLKSVKLKSLPLLLKGYIPSLVKLPFFIYRLGKEVDWEDEQECLDGILREIALLYIPDMVPKVDTLDASLSEDEKAQFINRKEHISSLLEHVLFPCIKRRFLAPRHILKDVVEIANLPDLYKVFERC

SEQ ID NO: 197 - protein, 769 aa, Saccharomyces cerevisiae
MSLRIKALDASVVNKIAAGEIIISPVNALKEMMENSIDANATMIDILVKEGGIKVLQITDNGSGINKADLPILCERFTTSKLQKFEDLSQIQTYGFRGEALASISHVARVTVTTKVKEDRCAWRVSYAEGKMLESPKPVAGKDGTTILVEDLFFNIPSRLRALRSHNDEYSKILDVVGRYAIHSKDIGFSCKKFGDSNYSLSVKPSYTVQDRIRTVFNKSVASNLITFHISKVEDLNLESVDGKVCNLNFISKKSISLIFFINNRLVTCDLLRRALNSVYSNYLPKGFRPFIYLGIVIDPAAVDVNVHPTKREVRFLSQDEIIEKIANQLHAELSAIDTSRTFKASSISTNKPESLIPFNDTIESDRNRKSLRQAQVVENSYTTANSQLRKAKRQENKLVRIDASQAKITSFLSSSQQFNFEGSSTKRQLSEPKVTNVSHSQEAEKLTLNESEQPRDANTINDNDLKDQPKKKQKLGDYKVPSIADDEKNALPISKDGYIRVPKERVNVNLTSIKKLREKVDDSIHRELTDIFANLNYVGVVDEERRLAAIQHDLKLFLIDYGSVCYELFYQIGLTDFANFGKINLQSTNVSDDIVLYNLLSEFDELNDDASKEKIISKIWDMSSMLNEYYSIELVNDGLDNDLKSVKLKSLPLLLKGYILSLVKLPFFIYRLGKEVDWEDEQECLDGILREIALLYIPDMVPKVDTLDASLSEDEKAQFINRKEHISSLLEHVLFPCIKRRFLAPRHILKDVVEIANLPDLYKVFERC

SEQ ID NO: 198 - protein, 769 aa, Artificial
  hybrid human-yeast MLH1 protein
MSLRIKALDASVVNKIAAGEIIISPVNALKEMMENSIDANATMIDILVKEGGIKVLQITDNGSGINKADLPILCERFTTSKLQKFEDLSQIQTYGFRGEALASISHVARVTVTTKVKEDRCAWRVSYAEGKMLESPKPVAGKDGTTILVEDLFFNIPSRLRALRSHNDEYSKILEVVGRYSVHNAGISFSVKKQGETVADVRTLPNASTVDRIRTVFNKSVASNLITFHISKVEDLNLESVDGKVCNLNFISKKSISLIFFINNRLVTCDLLRRALNSVYSNYLPKGFRPFIYLGIVIDPAAVDVNVHPTKREVRFLSQDEIIEKIANQLHAELSAIDTSRTFKASSISTNKPESLIPFNDTIESDRNRKSLRQAQVVENSYTTANSQLRKAKRQENKLVRIDASQAKITSFLSSSQQFNFEGSSTKRQLSEPKVTNVSHSQEAEKLTLNESEQPRDANTINDNDLKDQPKKKQKLGDYKVPSIADDEKNALPISKDGYIRVPKERVNVNLTSIKKLREKVDDSIHRELTDIFANLNYVGVVDEERRLAAIQHDLKLFLIDYGSVCYELFYQIGLTDFANFGKINLQSTNVSDDIVLYNLLSEFDELNDDASKEKIISKIWDMSSMLNEYYSIELVNDGLDNDLKSVKLKSLPLLLKGYIPSLVKLPFFIYRLGKEVDWEDEQECLDGILREIALLYIPDMVPKVDTLDASLSEDEKAQFINRKEHISSLLEHVLFPCIKRRFLAPRHILKDVVEIANLPDLYKVFERC

SEQ ID NO: 199 - protein, 766 aa, Artificial
  hybrid human-yeast MLH1 protein
MSLRIKALDASVVNKIAAGEIIISPVNALKEMMENSIDANATMIDILVKEGGIKVLQITDNGSGINKADLPILCERFTTSKLQKFEDLSQIQTYGFRGEALASISHVARVTVTTKVKEDRCAWRVSYAEGKMLESPKPVAGKDGTTILVEDLFFNIPSRLRALRSHNDEYSKILDVVGRYAIHSKDIGFSCKKFGDSNYSLSVKPNASTVDNIRSVFGNAVSRELIEIGCEDKTLAFKMNGYISNANYSVKKCIFLLFINHRLVTCDLLRRALNSVYSNYLPKGFRPFIYLGIVIDPAAVDVNVHPTKREVRFLSQDEIIEKIANQLHAELSAIDTSRTFKASSISTNKPESLIPFNDTIESDRNRKSLRQAQVVENSYTTANSQLRKAKRQENKLVRIDASQAKITSFLSSSQQFNFEGSSTKRQLSEPKVTNVSHSQEAEKLTLNESEQPRDANTINDNDLKDQPKKKQKLGDYKVPSIADDEKNALPISKDGYIRVPKERVNVNLTSIKKLREKVDDSIHRELTDIFANLNYVGVVDEERRLAAIQHDLKLFLIDYGSVCYELFYQIGLTDFANFGKINLQSTNVSDDIVLYNLLSEFDELNDDASKEKIISKIWDMSSMLNEYYSIELVNDGLDNDLKSVKLKSLPLLLKGYIPSLVKLPFFIYRLGKEVDWEDEQECLDGILREIALLYIPDMVPKVDTLDASLSEDEKAQFINRKEHISSLLEHVLFPCIKRRFLAPRHILKDVVEIANLPDLYKVFERC

SEQ ID NO: 200 - protein, 769 aa, Artificial
  hybrid human-yeast MLH1 protein
MSLRIKALDASVVNKIAAGEIIISPVNALKEMMENSIDANATMIDILVKEGGIKVLQITDNGSGINKADLPILCERFTTSKLQKFEDLSQIQTYGFRGEALASISHVARVTVTTKVKEDRCAWRVSYAEGKMLESPKPVAGKDGTTILVEDLFFNIPSRLRALRSHNDEYSKILDVVGRYAIHSKDIGFSCKKFGDSNYSLSVKPSYTVQDRIRTVFNKSVASNLITFHISKVEDLNLESVDGKVCNLNFISKKSISLIFFINNRLVESTSLRKAIETVYAAYLPKNTHPFLYLSLEISPQNVDVNVHPTKHEVHFLHEESILERVQQHIESKLLGSNSSRTFKASSISTNKPESLIPFNDTIESDRNRKSLRQAQVVENSYTTANSQLRKAKRQENKLVRIDASQAKITSFLSSSQQFNFEGSSTKRQLSEPKVTNVSHSQEAEKLTLNESEQPRDANTINDNDLKDQPKKKQKLGDYKVPSIADDEKNALPISKDGYIRVPKERVNVNLTSIKKLREKVDDSIHRELTDIFANLNYVGVVDEERRLAAIQHDLKLFLIDYGSVCYELFYQIGLTDFANFGKINLQSTNVSDDIVLYNLLSEFDELNDDASKEKIISKIWDMSSMLNEYYSIELVNDGLDNDLKSVKLKSLPLLLKGYIPSLVKLPFFIYRLGKEVDWEDEQECLDGILREIALLYIPDMVPKVDTLDASLSEDEKAQFINRKEHISSLLEHVLFPCIKRRFLAPRHILKDVVEIANLPDLYKVFERC

SEQ ID NO: 201 - protein, 769 aa, Artificial
  hybrid human-yeast MLH1 protein
MSLRIKALDASVVNKIAAGEIIISPVNALKEMMENSIDANATMIDILVKEGGIKVLQITDNGSGINKADLPILCERFTTSKLQKFEDLSQIQTYGFRGEALASISHVARVTVTTKVKEDRCAWRVSYAEGKMLESPKPVAGKDGTTILVEDLFFNIPSRLRALRSHNDEYSKILDVVGRYAIHSKDIGFSCKKFGDSNYSLSVKPSYTVQDRIRTVFNKSVASNLITFHISKVEDLNLESVDGKVCNLNFISKKSISLIFFINNRLVESTSLRKAIETVYAAYLPKNTHPFLYLSLEISPQNVDVNVHPTKREVRFLSQDEIIEKIANQLHAELSAIDTSRTFKASSISTNKPESLIPFNDTIESDRNRKSLRQAQVVENSYTTANSQLRKAKRQENKLVRIDASQAKITSFLSSSQQFNFEGSSTKRQLSEPKVTNVSHSQEAEKLTLNESEQPRDANTINDNDLKDQPKKKQKLGDYKVPSIADDEKNALPISKDGYIRVPKERVNVNLTSIKKLREKVDDSIHRELTDIFANLNYVGVVDEERRLAAIQHDLKLFLIDYGSVCYELFYQIGLTDFANFGKINLQSTNVSDDIVLYNLLSEFDELNDDASKEKIISKIWDMSSMLNEYYSIELVNDGLDNDLKSVKLKSLPLLLKGYIPSLVKLPFFIYRLGKEVDWEDEQECLDGILREIALLYIPDMVPKVDTLDASLSEDEKAQFINRKEHISSLLEHVLFPCIKRRFLAPRHILKDVVEIANLPDLYKVFERC

SEQ ID NO: 202 - protein, 769 aa, Artificial
  hybrid human-yeast MLH1 protein
MSLRIKALDASVVNKIAAGEIIISPVNALKEMMENSIDANATMIDILVKEGGIKVLQITDNGSGINKADLPILCERFTTSKLQKFEDLSQIQTYGFRGEALASISHVARVTVTTKVKEDRCAWRVSYAEGKMLESPKPVAGKDGTTILVEDLFFNIPSRLRALRSHNDEYSKILDVVGRYAIHSKDIGFSCKKFGDSNYSLSVKPSYTVQDRIRTVFNKSVASNLITFHISKVEDLNLESVDGKVCNLNFISKKSISLIFFINNRLVTCDLLRRALNSVYSNYLPKGFRPFIYLGIVISPQNVDVNVHPTKHEVHFLHEESILERVQQHIESKLLGSNSSRTFKASSISTNKPESLIPFNDTIESDRNRKSLRQAQVVENSYTTANSQLRKAKRQENKLVRIDASQAKITSFLSSSQQFNFEGSSTKRQLSEPKVTNVSHSQEAEKLTLNESEQPRDANTINDNDLKDQPKKKQKLGDYKVPSIADDEKNALPISKDGYIRVPKERVNVNLTSIKKLREKVDDSIHRELTDIFANLNYVGVVDEERRLAAIQHDLKLFLIDYGSVCYELFYQIGLTDFANFGKINLQSTNVSDDIVLYNLLSEFDELNDDASKEKIISKIWDMSSMLNEYYSIELVNDGLDNDLKSVKLKSLPLLLKGYIPSLVKLPFFIYRLGKEVDWEDEQECLDGILREIALLYIPDMVPKVDTLDASLSEDEKAQFINRKEHISSLLEHVLFPCIKRRFLAPRHILKDVVEIANLPDLYKVFERC

SEQ ID NO: 203 - DNA, 2895 bp, Saccharomyces cerevisiae
atgtcctccactaggccagagctaaaattctctgatgtatcagaggagagaaacttctataagaagtatacagggttgccgaagaaaccattaaaaaccattagattagtggataaaggcgactattacacagttataggttcagatgcgatatttgtggcagattcagtctatcatactcaatctgttttaaagaactgccaattggaccctgtaacggcaaagaacttccatgaaccaactaaatatgttactgtttcgctacaagttcttgccactctgctgaagttatgtttgttggatctgggatataaagttgagatatacgataagggttggaaattaataaaaagcgcatctccagggaacattgagcaagttaatgagctaatgaatatgaatattgattcgagtatcatcattgcaagtttgaaagttcaatggaattcccaagatggaaactgcattattggagttgctttcattgataccactgcatacaaggtgggaatgcttgatattgtcgataatgaagtgtattccaacctagagagtttcttgattcaattgggtgtaaaggaatgtttggtgcaggacttgacatcaaattcaaactccaatgctgaaatgcagaaagtaataaatgtaattgatcgctgtgggtgcgtcgttacattattgaaaaactcagaattttctgaaaaagatgtcgaactggatttaaccaagttactgggcgatgatttggcattatcgttaccacaaaaatactctaaattatctatgggtgcatgcaatgcattgattggatatttacaattgctctcagagcaagatcaagtaggcaagtatgaattagttgaacataaattaaaggagtttatgaagttggatgcctccgctattaaagcccttaatttattcccacaaggaccacaaaatccatttggtagcaacaatttagctgtatctggatttacgagtgctggtaattctggtaaagtaacttctcttttccagttactgaatcattgcaaaacaaatgctggtgttcggcttttaaatgaatggttgaagcaaccactgaccaatattgacgaaattaataaaagacatgatttagtcgactatctaattgaccaaatcgagttaagacagatgttgacttctgaatatttacccatgattccagatattcgtagattgactaagaaattaaataaaagaggaaacttagaggatgtcttgaaaatttaccaattcagtaaaagaataccagaaattgttcaagttttcacttcgttcttggaggacgacagccccactgaaccagtaaacgaactggtccgctccgtttggctagctcctttaagccaccacgttgaacctttgtccaaattcgaagaaatggttgaaacaacggttgatttggatgcttatgaagaaaataacgaatttatgattaaagttgagtttaatgaggaattaggaaagataagaagtaaactggatacgttgcgtgatgaaattcattcaatccatcttgattctgctgaagatctaggattcgatccggacaaaaaactgaagttggagaaccatcatctgcatggttggtgtatgaggttgacacgtaatgacgccaaggagttacgtaaacataagaagtacattgagttgtcgacagtaaaagctggtatattttttagtaccaaacaattaaagtcaatcgccaatgaaaccaatattcttcaaaaggagtacgacaagcaacaatcggctctggttagagaaattataaatattacattaacgtacacaccagtttttgaaaaactatccttagtcttagcgcatttagatgtgattgcctcttttgctcatacttcctcgtatgctcctataccatacattagacccaagttgcatcccatggattcggaaagaagaactcacctaataagctcccgtcatccagtactggaaatgcaagacgatataagctttatatctaatgatgtcacattagagagtggaaagggcgactttttaatcataactggaccaaacatgggaggtaaatctacttacatcagacaggttggtgtgatttctttaatggcccaaattggttgtttcgtaccttgtgaagaagctgaaatagccatagtagatgcaattctttgcagggtcggggcaggagattcccaattgaaaggtgtttccacatttatggttgaaatattggaaactgcttctatactaaagaatgcgagtaagaattctttgattattgtagatgaactagggcgtggtactagtacatatgatggttttggtctagcttgggcaattgctgaacatatcgcaagtaagattggatgtttcgctttgtttgcaactcactttcatgaattgacagaattgtctgaaaaattgcccaatgtcaagaatatgcatgttgttgcacatatcgagaaaaatttaaaagaacaaaaacatgacgatgaggacatcacgttgttatacaaagttgagcctggtatttcagatcagtcttttggtattcatgttgcagaagttgttcaatttccagaaaaaattgttaaaatggctaaacgtaaagccaatgaattggacgatctaaaaactaataatgaagatttgaaaaaagctaagctatcattacaggaagttaacgaaggtaatattcgtttgaaggctttactgaaagagtggattagaaaagtgaaggaggagggtttacatgacccaagcaaaattactgaagaagcttcccagcataaaatacaagagctattgcgtgctatagcaaatgaaccagaaaaggaaaacgataattacctgaaatatataaaagccttgttgttataa

SEQ ID NO: 204 - protein, 964 aa, Saccharomyces cerevisiae [sequence omitted]

SEQ ID NO: 205 - DNA, 2805 bp, Homo sapiens
atggcggtgcagccgaaggagacgctgcagttggagagcgcggccgaggtcggcttcgtgcgcttctttcagggcatgccggagaagccgaccaccacagtgcgccttttcgaccggggcgacttctatacggcgcacggcgaggacgcgctgctggccgcccgggaggtgttcaagacccagggggtgatcaagtacatggggccggcaggagcaaagaatctgcagagtgttgtgcttagtaaaatgaattttgaatcttttgtaaaagatcttcttctggttcgtcagtatagagttgaagtttataagaatagagctggaaataaggcatccaaggagaatgattggtatttggcatataaggcttctcctggcaatctctctcagtttgaagacattctctttggtaacaatgatatgtcagcttccattggtgttgtgggtgttaaaatgtccgcagttgatggccagagacaggttggagttgggtatgtggattccatacagaggaaactaggactgtgtgaattccctgataatgatcagttctccaatcttgaggctctcctcatccagattggaccaaaggaatgtgttttacccggaggagagactgctggagacatggggaaactgagacagataattcaaagaggaggaattctgatcacagaaagaaaaaaagctgacttttccacaaaagacatttatcaggacctcaaccggttgttgaaaggcaaaaagggagagcagatgaatagtgctgtattgccagaaatggagaatcaggttgcagtttcatcactgtctgcggtaatcaagtttttagaactcttatcagatgattccaactttggacagtttgaactgactacttttgacttcagccagtatatgaaattggatattgcagcagtcagagcccttaacctttttcagggttctgttgaagataccactggctctcagtctctggctgccttgctgaataagtgtaaaacccctcaaggacaaagacttgttaaccagtggattaagcagcctctcatggataagaacagaatagaggagagattgaatttagtggaagcttttgtagaagatgcagaattgaggcagactttacaagaagatttacttcgtcgattcccagatcttaaccgacttgccaagaagtttcaaagacaagcagcaaacttacaagattgttaccgactctatcagggtataaatcaactacctaatgttatacaggctctggaaaaacatgaaggaaaacaccagaaattattgttggcagtttttgtgactcctcttactgatcttcgttctgacttctccaagtttcaggaaatgatagaaacaactttagatatggatcaggtggaaaaccatgaattccttgtaaaaccttcatttgatcctaatctcagtgaattaagagaaataatgaatgacttggaaaagaagatgcagtcaacattaataagtgcagccagagatcttggcttggaccctggcaaacagattaaactggattccagtgcacagtttggatattactttcgtgtaacctgtaaggaagaaaaagtccttcgtaacaataaaaactttagtactgtagatatccagaagaatggtgttaaatttaccaacagcaaattgacttctttaaatgaagagtataccaaaaataaaacagaatatgaagaagcccaggatgccattgttaaagaaattgtcaatatttcttcaggctatgtagaaccaatgcagacactcaatgatgtgttagctcagctagatgctgttgtcagctttgctcacgtgtcaaatggagcacctgttccatatgtacgaccagccattttggagaaaggacaaggaagaattatattaaaagcatccaggcatgcttgtgttgaagttcaagatgaaattgcatttattcctaatgacgtatactttgaaaaagataaacagatgttccacatcattactggccccaatatgggaggtaaatcaacatatattcgacaaactggggtgatagtactcatggcccaaattgggtgttttgtgccatgtgagtcagcagaagtgtccattgtggactgcatcttagcccgagtaggggctggtgacagtcaattgaaaggagtctccacgttcatggctgaaatgttggaaactgcttctatcctcaggtctgcaaccaaagattcattaataatcatagatgaattgggaagaggaacttctacctacgatggatttgggttagcatgggctatatcagaatacattgcaacaaagattggtgctttttgcatgtttgcaacccattttcatgaacttactgccttggccaatcagataccaactgttaataatctacatgtcacagcactcaccactgaagagaccttaactatgctttatcaggtgaagaaaggtgtctgtgatcaaagttttgggattcatgttgcagagcttgctaatttccctaagcatgtaatagagtgtgctaaacagaaagccctggaacttgaggagtttcagtatattggagaatcgcaaggatatgatatcatggaaccagcagcaaagaagtgctatctggaaagagagcaaggtgaaaaaattattcaggagttcctgtccaaggtgaaacaaatgccctttactgaaatgtcagaagaaaacatcacaataaagttaaaacagctaaaagctgaagtaatagcaaagaataatagctttgtaaatgaaatcatttcacgaataaaagttactacgtga

SEQ ID NO: 206 - protein, 934 aa, Homo sapiens [sequence omitted]

SEQ ID NO: 207 - protein, 964 aa, Saccharomyces cerevisiae
MSSTRPELKFSDVSEERNFYKKYTGLPKKPLKTIRLVDKGDYYTVIGSDAIFVADSVYHTPSVLKNCQLDPVTAKNFHEPTKYVTVSLQVLATLLKLCLLDLGYKVEIYDKGWKLIKSASPGNIEQVNELMNMNIDSSIIIASLKVQWNSQDGNCIIGVAFIDTTAYKVGMLDIVDNEVYSNLESFLIQLGVKECLVQDLTSNSNSNAEMQKVINVIDRCGCVVTLLKNSEFSEKDVELDLTKLLGDDLALSLPQKYSKLSMGACNALIGYLQLLSEQDQVGKYELVEHKLKEFMKLDASAIKALNLFPQGPQNPFGSNNLAVSGFTSAGNSGKVTSLFQLLNHCKTNAGVRLLNEWLKQPLTNIDEINKRHDLVDYLIDQIELRQMLTSEYLPMIPDIRRLTKKLNKRGNLEDVLKIYQFSKRIPEIVQVFTSFLEDDSPTEPVNELVRSVWLAPLSHHVEPLSKFEEMVETTVDLDAYEENNEFMIKVEFNEELGKIRSKLDTLRDEIHSIHLDSAEDLGFDPDKKLKLENHHLHGWCMRLTRNDAKELRKHKKYIELSTVKAGIFFSTKQLKSIANETNILQKEYDKQQSALVREIINITLTYTPVFEKLSLVLAHLDVIASFAHTSSYAPIPYIRPKLHPMDSERRTHLISSRHPVLEMQDDISFISNDVTLESGKGDFLIITGPNMGGKSTYIRQVGVISLMAQIGCFVPCEEAEIAIVDAILCRVGAGDSQLKGVSTFMVEILETASILKNASKNSLIIVDELGRGTSTYDGFGLAWAIAEHIASKIGCFALFATHFHELTELSEKLPNVKNMHVVAHIEKNLKEQKHDDEDITLLYKVEPGISDQSFGIHVAEVVQFPEKIVKMAKRKANELDDLKTNNEDLKKAKLSLQEVNEGNIRLKALLKEWIRKVKEEGLHDPSKITEEASQHKIQELLRAIANEPEKENDNYLKYIKALLL

SEQ ID NO: 208 - protein, 964 aa, Saccharomyces cerevisiae
MSSTRPELKFSDVSEERNFYKKYTGLPKKPLKTIRLVDKGDYYTVIGSDAIFVADSVYHTQSVLKNCQLDPVTAKNFHEPTKYVTVSLQVLATLLKLCLLDLGYKVEIYDKGWKLIKSASPGSIEQVNELMNMNIDSSIIIASLKVQWNSQDGNCIIGVAFIDTTAYKVGMLDIVDNEVYSNLESFLIQLGVKECLVQDLTSNSNSNAEMQKVINVIDRCGCVVTLLKNSEFSEKDVELDLTKLLGDDLALSLPQKYSKLSMGACNALIGYLQLLSEQDQVGKYELVEHKLKEFMKLDASAIKALNLFPQGPQNPFGSNNLAVSGFTSAGNSGKVTSLFQLLNHCKTNAGVRLLNEWLKQPLTNIDEINKRHDLVDYLIDQIELRQMLTSEYLPMIPDIRRLTKKLNKRGNLEDVLKIYQFSKRIPEIVQVFTSFLEDDSPTEPVNELVRSVWLAPLSHHVEPLSKFEEMVETTVDLDAYEENNEFMIKVEFNEELGKIRSKLDTLRDEIHSIHLDSAEDLGFDPDKKLKLENHHLHGWCMRLTRNDAKELRKHKKYIELSTVKAGIFFSTKQLKSIANETNILQKEYDKQQSALVREIINITLTYTPVFEKLSLVLAHLDVIASFAHTSSYAPIPYIRPKLHPMDSERRTHLISSRHPVLEMQDDISFISNDVTLESGKGDFLIITGPNMGGKSTYIRQVGVISLMAQIGCFVPCEEAEIAIVDAILCRVGAGDSQLKGVSTFMVEILETASILKNASKNSLIIVDELGRGTSTYDGFGLAWAIAEHIASKIGCFALFATHFHELTELSEKLPNVKNMHVVAHIEKNLKEQKHDDEDITLLYKVEPGISDQSFGIHVAEVVQFPEKIVKMAKRKANELDDLKTNNEDLKKAKLSLQEVNEGNIRLKALLKEWIRKVKEEGLHDPSKITEEASQHKIQELLRAIANEPEKENDNYLKYIKALLL

SEQ ID NO: 209 - protein, 964 aa, Saccharomyces cerevisiae
MSSTRPELKFSDVSEERNFYKKYTGLPKKPLKTIRLVDKGDYYTVIGSDAIFVADSVYHTQSVLKNCQLDPVTAKNFHEPTKYVTVSLQVLATLLKLCLLDLGYKVEIYDKGWKLIKSASPGNIEQVNELMNMNIDSSIIIASLKVQWNSQDGNCIIGVAFIHTTAYKVGMLDIVDNEVYSNLESFLIQLGVKECLVQDLTSNSNSNAEMQKVINVIDRCGCVVTLLKNSEFSEKDVELDLTKLLGDDLALSLPQKYSKLSMGACNALIGYLQLLSEQDQVGKYELVEHKLKEFMKLDASAIKALNLFPQGPQNPFGSNNLAVSGFTSAGNSGKVTSLFQLLNHCKTNAGVRLLNEWLKQPLTNIDEINKRHDLVDYLIDQIELRQMLTSEYLPMIPDIRRLTKKLNKRGNLEDVLKIYQFSKRIPEIVQVFTSFLEDDSPTEPVNELVRSVWLAPLSHHVEPLSKFEEMVETTVDLDAYEENNEFMIKVEFNEELGKIRSKLDTLRDEIHSIHLDSAEDLGFDPDKKLKLENHHLHGWCMRLTRNDAKELRKHKKYIELSTVKAGIFFSTKQLKSIANETNILQKEYDKQQSALVREIINITLTYTPVFEKLSLVLAHLDVIASFAHTSSYAPIPYIRPKLHPMDSERRTHLISSRHPVLEMQDDISFISNDVTLESGKGDFLIITGPNMGGKSTYIRQVGVISLMAQIGCFVPCEEAEIAIVDAILCRVGAGDSQLKGVSTFMVEILETASILKNASKNSLIIVDELGRGTSTYDGFGLAWAIAEHIASKIGCFALFATHFHELTELSEKLPNVKNMHVVAHIEKNLKEQKHDDEDITLLYKVEPGISDQSFGIHVAEVVQFPEKIVKMAKRKANELDDLKTNNEDLKKAKLSLQEVNEGNIRLKALLKEWIRKVKEEGLHDPSKITEEASQHKIQELLRAIANEPEKENDNYLKYIKALLL

SEQ ID NO: 210 - protein, 964 aa, Saccharomyces cerevisiae
MSSTRPELKFSDVSEERNFYKKYTGLPKKPLKTIRLVDKGDYYTVIGSDAIFVADSVYHTQSVLKNCQLDPVTAKNFHEPTKYVTVSLQVLATLLKLCLLDLGYKVEIYDKGWKLIKSASPGNIEQVNELMNMNIDSSIIIASLKVQWNSQDGNCIIGVAFIDTTAYKVGMLDIVDNEVYSNLESFLIQLGVKGCLVQDLTSNSNSNAEMQKVINVIDRCGCVVTLLKNSEFSEKDVELDLTKLLGDDLALSLPQKYSKLSMGACNALIGYLQLLSEQDQVGKYELVEHKLKEFMKLDASAIKALNLFPQGPQNPFGSNNLAVSGFTSAGNSGKVTSLFQLLNHCKTNAGVRLLNEWLKQPLTNIDEINKRHDLVDYLIDQIELRQMLTSEYLPMIPDIRRLTKKLNKRGNLEDVLKIYQFSKRIPEIVQVFTSFLEDDSPTEPVNELVRSVWLAPLSHHVEPLSKFEEMVETTVDLDAYEENNEFMIKVEFNEELGKIRSKLDTLRDEIHSIHLDSAEDLGFDPDKKLKLENHHLHGWCMRLTRNDAKELRKHKKYIELSTVKAGIFFSTKQLKSIANETNILQKEYDKQQSALVREIINITLTYTPVFEKLSLVLAHLDVIASFAHTSSYAPIPYIRPKLHPMDSERRTHLISSRHPVLEMQDDISFISNDVTLESGKGDFLIITGPNMGGKSTYIRQVGVISLMAQIGCFVPCEEAEIAIVDAILCRVGAGDSQLKGVSTFMVEILETASILKNASKNSLIIVDELGRGTSTYDGFGLAWAIAEHIASKIGCFALFATHFHELTELSEKLPNVKNMHVVAHIEKNLKEQKHDDEDITLLYKVEPGISDQSFGIHVAEVVQFPEKIVKMAKRKANELDDLKTNNEDLKKAKLSLQEVNEGNIRLKALLKEWIRKVKEEGLHDPSKITEEASQHKIQELLRAIANEPEKENDNYLKYIKALLL

SEQ ID NO: 211 - protein, 964 aa, Saccharomyces cerevisiae
MSSTRPELKFSDVSEERNFYKKYTGLPKKPLKTIRLVDKGDYYTVIGSDAIFVADSVYHTQSVLKNCQLDPVTAKNFHEPTKYVTVSLQVLATLLKLCLLDLGYKVEIYDKGWKLIKSASPGNIEQVNELMNMNIDSSIIIASLKVQWNSQDGNCIIGVAFIDTTAYKVGMLDIVDNEVYSNLESFLIQLGVKERLVQDLTSNSNSNAEMQKVINVIDRCGCVVTLLKNSEFSEKDVELDLTKLLGDDLALSLPQKYSKLSMGACNALIGYLQLLSEQDQVGKYELVEHKLKEFMKLDASAIKALNLFPQGPQNPFGSNNLAVSGFTSAGNSGKVTSLFQLLNHCKTNAGVRLLNEWLKQPLTNIDEINKRHDLVDYLIDQIELRQMLTSEYLPMIPDIRRLTKKLNKRGNLEDVLKIYQFSKRIPEIVQVFTSFLEDDSPTEPVNELVRSVWLAPLSHHVEPLSKFEEMVETTVDLDAYEENNEFMIKVEFNEELGKIRSKLDTLRDEIHSIHLDSAEDLGFDPDKKLKLENHHLHGWCMRLTRNDAKELRKHKKYIELSTVKAGIFFSTKQLKSIANETNILQKEYDKQQSALVREIINITLTYTPVFEKLSLVLAHLDVIASFAHTSSYAPIPYIRPKLHPMDSERRTHLISSRHPVLEMQDDISFISNDVTLESGKGDFLIITGPNMGGKSTYIRQVGVISLMAQIGCFVPCEEAEIAIVDAILCRVGAGDSQLKGVSTFMVEILETASILKNASKNSLIIVDELGRGTSTYDGFGLAWAIAEHIASKIGCFALFATHFHELTELSEKLPNVKNMHVVAHIEKNLKEQKHDDEDITLLYKVEPGISDQSFGIHVAEVVQFPEKIVKMAKRKANELDDLKTNNEDLKKAKLSLQEVNEGNIRLKALLKEWIRKVKEEGLHDPSKITEEASQHKIQELLRAIANEPEKENDNYLKYIKALLL

SEQ ID NO: 212 - protein, 964 aa, Saccharomyces cerevisiae
MSSTRPELKFSDVSEERNFYKKYTGLPKKPLKTIRLVDKGDYYTVIGSDAIFVADSVYHTQSVLKNCQLDPVTAKNFHEPTKYVTVSLQVLATLLKLCLLDLGYKVEIYDKGWKLIKSASPGNIEQVNELMNMNIDSSIIIASLKVQWNSQDGNCIIGVAFIDTTAYKVGMLDIVDNEVYSNLESFLIQLGVKECLVQDLTSNSNSNAEMQKVINVIDRCGCVVTLLKNSEFSEKDVELDLTKLLGDDLALSLPQKYSKLSMGACNVLIGYLQLLSEQDQVGKYELVEHKLKEFMKLDASAIKALNLFPQGPQNPFGSNNLAVSGFTSAGNSGKVTSLFQLLNHCKTNAGVRLLNEWLKQPLTNIDEINKRHDLVDYLIDQIELRQMLTSEYLPMIPDIRRLTKKLNKRGNLEDVLKIYQFSKRIPEIVQVFTSFLEDDSPTEPVNELVRSVWLAPLSHHVEPLSKFEEMVETTVDLDAYEENNEFMIKVEFNEELGKIRSKLDTLRDEIHSIHLDSAEDLGFDPDKKLKLENHHLHGWCMRLTRNDAKELRKHKKYIELSTVKAGIFFSTKQLKSIANETNILQKEYDKQQSALVREIINITLTYTPVFEKLSLVLAHLDVIASFAHTSSYAPIPYIRPKLHPMDSERRTHLISSRHPVLEMQDDISFISNDVTLESGKGDFLIITGPNMGGKSTYIRQVGVISLMAQIGCFVPCEEAEIAIVDAILCRVGAGDSQLKGVSTFMVEILETASILKNASKNSLIIVDELGRGTSTYDGFGLAWAIAEHIASKIGCFALFATHFHELTELSEKLPNVKNMHVVAHIEKNLKEQKHDDEDITLLYKVEPGISDQSFGIHVAEVVQFPEKIVKMAKRKANELDDLKTNNEDLKKAKLSLQEVNEGNIRLKALLKEWIRKVKEEGLHDPSKITEEASQHKIQELLRAIANEPEKENDNYLKYIKALLL

SEQ ID NO: 213 - protein, 964 aa, Saccharomyces cerevisiae
MSSTRPELKFSDVSEERNFYKKYTGLPKKPLKTIRLVDKGDYYTVIGSDAIFVADSVYHTQSVLKNCQLDPVTAKNFHEPTKYVTVSLQVLATLLKLCLLDLGYKVEIYDKGWKLIKSASPGNIEQVNELMNMNIDSSIIIASLKVQWNSQDGNCIIGVAFIDTTAYKVGMLDIVDNEVYSNLESFLIQLGVKECLVQDLTSNSNSNAEMQKVINVIDRCGCVVTLLKNSEFSEKDVELDLTKLLGDDLALSLPQKYSKLSMGACNALIGYLQLLSEQDQVGKYELVEHKLKEFMKLDASAIKALNLFPQGPQNPFGSNNLAVSGFTSAGNSGKVTSLFQLLNHCKTNAGVRLLNEWLKQPLTNIDEINKRHDLVDYLIDQIELRQMLTSEYLPMIPDIRRFTKKLNKRGNLEDVLKIYQFSKRIPEIVQVFTSFLEDDSPTEPVNELVRSVWLAPLSHHVEPLSKFEEMVETTVDLDAYEENNEFMIKVEFNEELGKIRSKLDTLRDEIHSIHLDSAEDLGFDPDKKLKLENHHLHGWCMRLTRNDAKELRKHKKYIELSTVKAGIFFSTKQLKSIANETNILQKEYDKQQSALVREIINITLTYTPVFEKLSLVLAHLDVIASFAHTSSYAPIPYIRPKLHPMDSERRTHLISSRHPVLEMQDDISFISNDVTLESGKGDFLIITGPNMGGKSTYIRQVGVISLMAQIGCFVPCEEAEIAIVDAILCRVGAGDSQLKGVSTFMVEILETASILKNASKNSLIIVDELGRGTSTYDGFGLAWAIAEHIASKIGCFALFATHFHELTELSEKLPNVKNMHVVAHIEKNLKEQKHDDEDITLLYKVEPGISDQSFGIHVAEVVQFPEKIVKMAKRKANELDDLKTNNEDLKKAKLSLQEVNEGNIRLKALLKEWIRKVKEEGLHDPSKITEEASQHKIQELLRAIANEPEKENDNYLKYIKALLL

SEQ ID NO: 214 - protein, 964 aa, Saccharomyces cerevisiae
MSSTRPELKFSDVSEERNFYKKYTGLPKKPLKTIRLVDKGDYYTVIGSDAIFVADSVYHTQSVLKNCQLDPVTAKNFHEPTKYVTVSLQVLATLLKLCLLDLGYKVEIYDKGWKLIKSASPGNIEQVNELMNMNIDSSIIIASLKVQWNSQDGNCIIGVAFIDTTAYKVGMLDIVDNEVYSNLESFLIQLGVKECLVQDLTSNSNSNAEMQKVINVIDRCGCVVTLLKNSEFSEKDVELDLTKLLGDDLALSLPQKYSKLSMGACNALIGYLQLLSEQDQVGKYELVEHKLKEFMKLDASAIKALNLFPQGPQNPFGSNNLAVSGFTSAGNSGKVTSLFQLLNHCKTNAGVRLLNEWLKQPLTNIDEINKRHDLVDYLIDQIELRQMLTSEYLPMIPDIRRVTKKLNKRGNLEDVLKIYQFSKRIPEIVQVFTSFLEDDSPTEPVNELVRSVWLAPLSHHVEPLSKFEEMVETTVDLDAYEENNEFMIKVEFNEELGKIRSKLDTLRDEIHSIHLDSAEDLGFDPDKKLKLENHHLHGWCMRLTRNDAKELRKHKKYIELSTVKAGIFFSTKQLKSIANETNILQKEYDKQQSALVREIINITLTYTPVFEKLSLVLAHLDVIASFAHTSSYAPIPYIRPKLHPMDSERRTHLISSRHPVLEMQDDISFISNDVTLESGKGDFLIITGPNMGGKSTYIRQVGVISLMAQIGCFVPCEEAEIAIVDAILCRVGAGDSQLKGVSTFMVEILETASILKNASKNSLIIVDELGRGTSTYDGFGLAWAIAEHIASKIGCFALFATHFHELTELSEKLPNVKNMHVVAHIEKNLKEQKHDDEDITLLYKVEPGISDQSFGIHVAEVVQFPEKIVKMAKRKANELDDLKTNNEDLKKAKLSLQEVNEGNIRLKALLKEWIRKVKEEGLHDPSKITEEASQHKIQELLRAIANEPEKENDNYLKYIKALLL

SEQ ID NO: 215 - protein, 964 aa, Saccharomyces cerevisiae
MSSTRPELKFSDVSEERNFYKKYTGLPKKPLKTIRLVDKGDYYTVIGSDAIFVADSVYHTQSVLKNCQLDPVTAKNFHEPTKYVTVSLQVLATLLKLCLLDLGYKVEIYDKGWKLIKSASPGNIEQVNELMNMNIDSSIIIASLKVQWNSQDGNCIIGVAFIDTTAYKVGMLDIVDNEVYSNLESFLIQLGVKECLVQDLTSNSNSNAEMQKVINVIDRCGCVVTLLKNSEFSEKDVELDLTKLLGDDLALSLPQKYSKLSMGACNALIGYLQLLSEQDQVGKYELVEHKLKEFMKLDASAIKALNLFPQGPQNPFGSNNLAVSGFTSAGNSGKVTSLFQLLNHCKTNAGVRLLNEWLKQPLTNIDEINKRHDLVDYLIDQIELRQMLTSEYLPMIPDIRRLTKKLNKRGNLEDVLKIYQFSKRIPEIVQVFTSFLEDDSPTEPVNELVRSVWLAPLSHHVEPLSKFEEMVETTVDLDAYEENNEFMIKVEFNEELGKIRSKLDTLRDEIHSIHLDSAEDPGFDPDKKLKLENHHLHGWCMRLTRNDAKELRKHKKYIELSTVKAGIFFSTKQLKSIANETNILQKEYDKQQSALVREIINITLTYTPVFEKLSLVLAHLDVIASFAHTSSYAPIPYIRPKLHPMDSERRTHLISSRHPVLEMQDDISFISNDVTLESGKGDFLIITGPNMGGKSTYIRQVGVISLMAQIGCFVPCEEAEIAIVDAILCRVGAGDSQLKGVSTFMVEILETASILKNASKNSLIIVDELGRGTSTYDGFGLAWAIAEHIASKIGCFALFATHFHELTELSEKLPNVKNMHVVAHIEKNLKEQKHDDEDITLLYKVEPGISDQSFGIHVAEVVQFPEKIVKMAKRKANELDDLKTNNEDLKKAKLSLQEVNEGNIRLKALLKEWIRKVKEEGLHDPSKITEEASQHKIQELLRAIANEPEKENDNYLKYIKALLL

SEQ ID NO: 216 - protein, 964 aa, Saccharomyces cerevisiae
MSSTRPELKFSDVSEERNFYKKYTGLPKKPLKTIRLVDKGDYYTVIGSDAIFVADSVYHTQSVLKNCQLDPVTAKNFHEPTKYVTVSLQVLATLLKLCLLDLGYKVEIYDKGWKLIKSASPGNIEQVNELMNMNIDSSIIIASLKVQWNSQDGNCIIGVAFIDTTAYKVGMLDIVDNEVYSNLESFLIQLGVKECLVQDLTSNSNSNAEMQKVINVIDRCGCVVTLLKNSEFSEKDVELDLTKLLGDDLALSLPQKYSKLSMGACNALIGYLQLLSEQDQVGKYELVEHKLKEFMKLDASAIKALNLFPQGPQNPFGSNNLAVSGFTSAGNSGKVTSLFQLLNHCKTNAGVRLLNEWLKQPLTNIDEINKRHDLVDYLIDQIELRQMLTSEYLPMIPDIRRLTKKLNKRGNLEDVLKIYQFSKRIPEIVQVFTSFLEDDSPTEPVNELVRSVWLAPLSHHVEPLSKFEEMVETTVDLDAYEENNEFMIKVEFNEELGKIRSKLDTLRDEIHSIHLDSAEDLGFDPDKKLKLENHHLHGWCMRLTRNDAKELRKHKKYIELSTVKAGIFFSTKQLKSIANETNILQKEYDKQQSALVREIINITLTYTPVFEKLSLVLAHLDVIASFAHTSSYAPIPYIRPKLHPMDSERRTHLISSRHPVLEMQDDISFISNDVTLESGKGDFLIITGPNMGGKSTYIRQVRVISLMAQIGCFVPCEEAEIAIVDAILCRVGAGDSQLKGVSTFMVEILETASILKNASKNSLIIVDELGRGTSTYDGFGLAWAIAEHIASKIGCFALFATHFHELTELSEKLPNVKNMHVVAHIEKNLKEQKHDDEDITLLYKVEPGISDQSFGIHVAEVVQFPEKIVKMAKRKANELDDLKTNNEDLKKAKLSLQEVNEGNIRLKALLKEWIRKVKEEGLHDPSKITEEASQHKIQELLRAIANEPEKENDNYLKYIKALLL

SEQ ID NO: 217 - protein, 964 aa, Saccharomyces cerevisiae
MSSTRPELKFSDVSEERNFYKKYTGLPKKPLKTIRLVDKGDYYTVIGSDAIFVADSVYHTQSVLKNCQLDPVTAKNFHEPTKYVTVSLQVLATLLKLCLLDLGYKVEIYDKGWKLIKSASPGNIEQVNELMNMNIDSSIIIASLKVQWNSQDGNCIIGVAFIDTTAYKVGMLDIVDNEVYSNLESFLIQLGVKECLVQDLTSNSNSNAEMQKVINVIDRCGCVVTLLKNSEFSEKDVELDLTKLLGDDLALSLPQKYSKLSMGACNALIGYLQLLSEQDQVGKYELVEHKLKEFMKLDASAIKALNLFPQGPQNPFGSNNLAVSGFTSAGNSGKVTSLFQLLNHCKTNAGVRLLNEWLKQPLTNIDEINKRHDLVDYLIDQIELRQMLTSEYLPMIPDIRRLTKKLNKRGNLEDVLKIYQFSKRIPEIVQVFTSFLEDDSPTEPVNELVRSVWLAPLSHHVEPLSKFEEMVETTVDLDAYEENNEFMIKVEFNEELGKIRSKLDTLRDEIHSIHLDSAEDLGFDPDKKLKLENHHLHGWCMRLTRNDAKELRKHKKYIELSTVKAGIFFSTKQLKSIANETNILQKEYDKQQSALVREIINITLTYTPVFEKLSLVLAHLDVIASFAHTSSYAPIPYIRPKLHPMDSERRTHLISSRHPVLEMQDDISFISNDVTLESGKGDFLIITGPNMGGKSTYIRQVVVISLMAQIGCFVPCEEAEIAIVDAILCRVGAGDSQLKGVSTFMVEILETASILKNASKNSLIIVDELGRGTSTYDGFGLAWAIAEHIASKIGCFALFATHFHELTELSEKLPNVKNMHVVAHIEKNLKEQKHDDEDITLLYKVEPGISDQSFGIHVAEVVQFPEKIVKMAKRKANELDDLKTNNEDLKKAKLSLQEVNEGNIRLKALLKEWIRKVKEEGLHDPSKITEEASQHKIQELLRAIANEPEKENDNYLKYIKALLL

SEQ ID NO: 218 - protein, 964 aa, Saccharomyces cerevisiae
MSSTRPELKFSDVSEERNFYKKYTGLPKKPLKTIRLVDKGDYYTVIGSDAIFVADSVYHTQSVLKNCQLDPVTAKNFHEPTKYVTVSLQVLATLLKLCLLDLGYKVEIYDKGWKLIKSASPGNIEQVNELMNMNIDSSIIIASLKVQWNSQDGNCIIGVAFIDTTAYKVGMLDIVDNEVYSNLESFLIQLGVKECLVQDLTSNSNSNAEMQKVINVIDRCGCVVTLLKNSEFSEKDVELDLTKLLGDDLALSLPQKYSKLSMGACNALIGYLQLLSEQDQVGKYELVEHKLKEFMKLDASAIKALNLFPQGPQNPFGSNNLAVSGFTSAGNSGKVTSLFQLLNHCKTNAGVRLLNEWLKQPLTNIDEINKRHDLVDYLIDQIELRQMLTSEYLPMIPDIRRLTKKLNKRGNLEDVLKIYQFSKRIPEIVQVFTSFLEDDSPTEPVNELVRSVWLAPLSHHVEPLSKFEEMVETTVDLDAYEENNEFMIKVEFNEELGKIRSKLDTLRDEIHSIHLDSAEDLGFDPDKKLKLENHHLHGWCMRLTRNDAKELRKHKKYIELSTVKAGIFFSTKQLKSIANETNILQKEYDKQQSALVREIINITLTYTPVFEKLSLVLAHLDVIASFAHTSSYAPIPYIRPKLHPMDSERRTHLISSRHPVLEMQDDISFISNDVTLESGKGDFLIITGPNMGGKSTYIRQVGVISLIAQIGCFVPCEEAEIAIVDAILCRVGAGDSQLKGVSTFMVEILETASILKNASKNSLIIVDELGRGTSTYDGFGLAWAIAEHIASKIGCFALFATHFHELTELSEKLPNVKNMHVVAHIEKNLKEQKHDDEDITLLYKVEPGISDQSFGIHVAEVVQFPEKIVKMAKRKANELDDLKTNNEDLKKAKLSLQEVNEGNIRLKALLKEWIRKVKEEGLHDPSKITEEASQHKIQELLRAIANEPEKENDNYLKYIKALLL

SEQ ID NO: 219 - protein, 964 aa, Saccharomyces cerevisiae
MSSTRPELKFSDVSEERNFYKKYTGLPKKPLKTIRLVDKGDYYTVIGSDAIFVADSVYHTQSVLKNCQLDPVTAKNFHEPTKYVTVSLQVLATLLKLCLLDLGYKVEIYDKGWKLIKSASPGNIEQVNELMNMNIDSSIIIASLKVQWNSQDGNCIIGVAFIDTTAYKVGMLDIVDNEVYSNLESFLIQLGVKECLVQDLTSNSNSNAEMQKVINVIDRCGCVVTLLKNSEFSEKDVELDLTKLLGDDLALSLPQKYSKLSMGACNALIGYLQLLSEQDQVGKYELVEHKLKEFMKLDASAIKALNLFPQGPQNPFGSNNLAVSGFTSAGNSGKVTSLFQLLNHCKTNAGVRLLNEWLKQPLTNIDEINKRHDLVDYLIDQIELRQMLTSEYLPMIPDIRRLTKKLNKRGNLEDVLKIYQFSKRIPEIVQVFTSFLEDDSPTEPVNELVRSVWLAPLSHHVEPLSKFEEMVETTVDLDAYEENNEFMIKVEFNEELGKIRSKLDTLRDEIHSIHLDSAEDLGFDPDKKLKLENHHLHGWCMRLTRNDAKELRKHKKYIELSTVKAGIFFSTKQLKSIANETNILQKEYDKQQSALVREIINITLTYTPVFEKLSLVLAHLDVIASFAHTSSYAPIPYIRPKLHPMDSERRTHLISSRHPVLEMQDDISFISNDVTLESGKGDFLIITGPNMGGKSTYIRQVGVISLMAQIGCFVPCEEAEIAIVDAILCRVGAGDSQLKGVSTFMVEILETASVLKNASKNSLIIVDELGRGTSTYDGFGLAWAIAEHIASKIGCFALFATHFHELTELSEKLPNVKNMHVVAHIEKNLKEQKHDDEDITLLYKVEPGISDQSFGIHVAEVVQFPEKIVKMAKRKANELDDLKTNNEDLKKAKLSLQEVNEGNIRLKALLKEWIRKVKEEGLHDPSKITEEASQHKIQELLRAIANEPEKENDNYLKYIKALLL

SEQ ID NO: 220 - protein, 964 aa, Saccharomyces cerevisiae
MSSTRPELKFSDVSEERNFYKKYTGLPKKPLKTIRLVDKGDYYTVIGSDAIFVADSVYHTQSVLKNCQLDPVTAKNFHEPTKYVTVSLQVLATLLKLCLLDLGYKVEIYDKGWKLIKSASPGNIEQVNELMNMNIDSSIIIASLKVQWNSQDGNCIIGVAFIDTTAYKVGMLDIVDNEVYSNLESFLIQLGVKECLVQDLTSNSNSNAEMQKVINVIDRCGCVVTLLKNSEFSEKDVELDLTKLLGDDLALSLPQKYSKLSMGACNALIGYLQLLSEQDQVGKYELVEHKLKEFMKLDASAIKALNLFPQGPQNPFGSNNLAVSGFTSAGNSGKVTSLFQLLNHCKTNAGVRLLNEWLKQPLTNIDEINKRHDLVDYLIDQIELRQMLTSEYLPMIPDIRRLTKKLNKRGNLEDVLKIYQFSKRIPEIVQVFTSFLEDDSPTEPVNELVRSVWLAPLSHHVEPLSKFEEMVETTVDLDAYEENNEFMIKVEFNEELGKIRSKLDTLRDEIHSIHLDSAEDLGFDPDKKLKLENHHLHGWCMRLTRNDAKELRKHKKYIELSTVKAGIFFSTKQLKSIANETNILQKEYDKQQSALVREIINITLTYTPVFEKLSLVLAHLDVIASFAHTSSYAPIPYIRPKLHPMDSERRTHLISSRHPVLEMQDDISFISNDVTLESGKGDFLIITGPNMGGKSTYIRQVGVISLMAQIGCFVPCEEAEIAIVDAILCRVGAGDSQLKGVSTFMVEILETASILKNASKNSLIIVDELGRGTSTYDGFGLAWAIAEHIASKIGCFALFATHFHELTELSEKLPNVKNMHVVAHIEKNLKEQKHDDEDITLLYKVEPGISDQSFGIHVAEVVQFPEKIVKMAERKANELDDLKTNNEDLKKAKLSLQEVNEGNIRLKALLKEWIRKVKEEGLHDPSKITEEASQHKIQELLRAIANEPEKENDNYLKYIKALLL

SEQ ID NO: 221 - DNA, 49 bp, Artificial sequence
  oligonucleotide
gcgcggatccaaaatcctcagattaaaagtatggcagtgcagccgaagg

SEQ ID NO: 222 - DNA, 38 bp, Artificial sequence
  oligonucleotide
ccaattggcagttctttaacaccccctgggtcttgaac

SEQ ID NO: 223 - DNA, 19 bp, Artificial sequence
  oligonucleotide
ttaaagaactgccaattgg

SEQ ID NO: 224 - DNA, 21 bp, Artificial sequence
  oligonucleotide
cttatatcgtcttgcatttcc

SEQ ID NO: 225 - DNA, 32 bp, Artificial sequence
  oligonucleotide
gtgtcctcaggtctgcgagtaagaattctttg

SEQ ID NO: 226 - DNA, 30 bp, Artificial sequence
  oligonucleotide
gcgcctcgagtcacttaagatgtcgttgta

SEQ ID NO: 227 - DNA, 18 bp, Artificial sequence
  oligonucleotide
tggcattatcgttaccac

SEQ ID NO: 228 - DNA, 34 bp, Artificial sequence
  oligonucleotide
acaccctgaggatagaagcagtttccaatatttc

SEQ ID NO: 229 - DNA, 43 bp, Artificial sequence
  oligonucleotide
aatcttaaggaacaaaaacatgacgaagagaccttaactatgc

SEQ ID NO: 230 - DNA, 21 bp, Artificial sequence
  oligonucleotide
ttacattaacgtacacaccag

SEQ ID NO: 231 - DNA, 48 bp, Artificial sequence
  oligonucleotide
gtcatgtttttgttccttaagatttttagtggtgagcgctgtgacatg

SEQ ID NO: 232 - DNA, 19 bp, Artificial sequence
  oligonucleotide
gttgcatggctacgaaccg

SEQ ID NO: 233 - DNA, 47 bp, Artificial sequence
  oligonucleotide
gtgtgtgtgtgtgtgtgtgtgtgtgtcatacttgattgttttgtccg

SEQ ID NO: 234 - DNA, 82 bp, Artificial sequence
  oligonucleotide
acacacacacacacacacacacacacacacacacacacagggggggggggggggggggattctagaacagttggtatattag

SEQ ID NO: 235 - DNA, 29 bp, Artificial sequence
  oligonucleotide
ttatttgctgtacaagtatatcaataaac

SEQ ID NO: 236 - DNA, 57 bp, Artificial sequence
  sequence of microsatellite in ADE2::MS3::ADE2 allele
acacacacacacacacacacacacacacacacacacacagggggggggggggggggg

SEQ ID NO: 237 - protein, 19 aa, Artificial sequence
  sequence of amino acids inserted between Methionine-1 and Asparti c acid-2 as a result of microsatellite in ADE2 gene (ADE2::MS3::A DE2 allele)
THTHTHTHTHTHTGGGGGG

SEQ ID NO: 238 - DNA, 27 bp, Artificial sequence
  oligonucleotide
cgcgatcgatcatgcttatgggttagc

SEQ ID NO: 239 - DNA, 19 bp, Artificial sequence
  oligonucleotide
tcaactaggatcgtggtac

SEQ ID NO: 240 - DNA, 28 bp, Artificial sequence
  oligonucleotide
gcgcggatccatagacctatcaataagc

SEQ ID NO: 241 - DNA, 18 bp, Artificial sequence
  oligonucleotide
ggagttctcgaagacgag

SEQ ID NO: 242 - DNA, 18 bp, Artificial sequence
  oligonucleotide
cgggtgaacgttaacatc

SEQ ID NO: 243 - DNA, 22 bp, Artificial sequence
  oligonucleotide
agagtattcatcattatgggac

SEQ ID NO: 244 - DNA, 34 bp, Artificial sequence
  oligonucleotide
ctgtatcgatgcatgttccacaagtattcaagtg

SEQ ID NO: 245 - DNA, 34 bp, Artificial sequence
  oligonucleotide
ctgtatcgatgcagaatccacaagtattcaagtg

SEQ ID NO: 246 - DNA, 34 bp, Artificial sequence
  oligonucleotide
ctgtatcgatgcacattccacaagtattcaagtg

SEQ ID NO: 247 - DNA, 34 bp, Artificial sequence
  oligonucleotide
ctgtatcgatgcaaagtccacaagtattcaagtg

SEQ ID NO: 248 - DNA, 34 bp, Artificial sequence
  oligonucleotide
ctgtatcgatgcaccttccacaagtattcaagtg

SEQ ID NO: 249 - DNA, 34 bp, Artificial sequence
  oligonucleotide
ctgtatcgatgcacaatccacaagtattcaagtg

SEQ ID NO: 250 - DNA, 34 bp, Artificial sequence
  oligonucleotide
ctgtatcgatgcatggtccacaagtattcaagtg

SEQ ID NO: 251 - protein, 769 aa, Artificial sequence
  hybrid human-yeast MLH1 protein with single amino acid variation
MSLRIKALDASVVNKIAAGEIIISPVNALKEMMENSIDACSTSIQVIVKEGGLKLIQIQDNGTGIRKEDLDIVCERFTTSKLQKFEDLSQIQTYGFRGEALASISHVARVTVTTKVKEDRCAWRVSYAEGKMLESPKPVAGKDGTTILVEDLFFNIPSRLRALRSHNDEYSKILDVVGRYAIHSKDIGFSCKKFGDSNYSLSVKPSYTVQDRIRTVFNKSVASNLITFHISKVEDLNLESVDGKVCNLNFISKKSISLIFFINNRLVTCDLLRRALNSVYSNYLPKGFRPFIYLGIVIDPAAVDVNVHPTKREVRFLSQDEIIEKIANQLHAELSAIDTSRTFKASSISTNKPESLIPFNDTIESDRNRKSLRQAQVVENSYTTANSQLRKAKRQENKLVRIDASQAKITSFLSSSQQFNFEGSSTKRQLSEPKVTNVSHSQEAEKLTLNESEQPRDANTINDNDLKDQPKKKQKLGDYKVPSIADDEKNALPISKDGYIRVPKERVNVNLTSIKKLREKVDDSIHRELTDIFANLNYVGVVDEERRLAAIQHDLKLFLIDYGSVCYELFYQIGLTDFANFGKINLQSTNVSDDIVLYNLLSEFDELNDDASKEKIISKIWDMSSMLNEYYSIELVNDGLDNDLKSVKLKSLPLLLKGYIPSLVKLPFFIYRLGKEVDWEDEQECLDGILREIALLYIPDMVPKVDTLDASLSEDEKAQFINRKEHISSLLEHVLFPCIKRRFLAPRHILKDVVEIANLPDLYKVFERC

SEQ ID NO: 252 - protein, 649 aa, Artificial sequence
  hybrid human-yeast MLH1 protein with single amino acid variation
CAWRVSYAEGKMLESPKPVAGKDGTTILVEDLFFNIPSRLRALRSHNDEYSKILDVVGRYAIHSKDIGFSCKKFGDSNYSLSVKPSYTVQDRIRTVFNKSVASNLITFHISKVEDLNLESVDGKVCNLNFISKKSISLIFFINNRLVTCDLLRRALNSVYSNYLPKGFRPFIYLGIVIDPAAVDVNVHPTKREVRFLSQDEIIEKIANQLHAELSAIDTSRTFKASSISTNKPESLIPFNDTIESDRNRKSLRQAQVVENSYTTANSQLRKAKRQENKLVRIDASQAKITSFLSSSQQFNFEGSSTKRQLSEPKVTNVSHSQEAEKLTLNESEQPRDANTINDNDLKDQPKKKQKLGDYKVPSIADDEKNALPISKDGYIRVPKERVNVNLTSIKKLREKVDDSIHRELTDIFANLNYVGVVDEERRLAAIQHDLKLFLIDYGSVCYELFYQIGLTDFANFGKINLQSTNVSDDIVLYNLLSEFDELNDDASKEKIISKIWDMSSMLNEYYSIELVNDGLDNDLKSVKLKSLPLLLKGYIPSLVKLPFFIYRLGKEVDWEDEQECLDGILREIALLYIPDMVPKVDTLDASLSEDEKAQFINRKEHISSLLEHVLFPCIKRRFLAPRHILKDVVEIANLPDLYKVFERC

SEQ ID NO: 253 - protein, 769 aa, Artificial sequence
  hybrid human-yeast MLH1 protein with single amino acid variation
MSLRIKALDASVVNKIAAGEIIISPVNALKEMMENSIDAHSTSIQVIVKEGGLKLIQIQDNGTGIRKEDLDIVCERFTTSKLQKFEDLSQIQTYGFRGEALASISHVARVTVTTKVKEDRCAWRVSYAEGKMLESPKPVAGKDGTTILVEDLFFNIPSRLRALRSHNDEYSKILDVVGRYAIHSKDIGFSCKKFGDSNYSLSVKPSYTVQDRIRTVFNKSVASNLITFHISKVEDLNLESVDGKVCNLNFISKKSISLIFFINNRLVTCDLLRRALNSVYSNYLPKGFRPFIYLGIVIDPAAVDVNVHPTKREVRFLSQDEIIEKIANQLHAELSAIDTSRTFKASSISTNKPESLIPFNDTIESDRNRKSLRQAQVVENSYTTANSQLRKAKRQENKLVRIDASQAKITSFLSSSQQFNFEGSSTKRQLSEPKVTNVSHSQEAEKLTLNESEQPRDANTINDNDLKDQPKKKQKLGDYKVPSIADDEKNALPISKDGYIRVPKERVNVNLTSIKKLREKVDDSIHRELTDIFANLNYVGVVDEERRLAAIQHDLKLFLIDYGSVCYELFYQIGLTDFANFGKINLQSTNVSDDIVLYNLLSEFDELNDDASKEKIISKIWDMSSMLNEYYSIELVNDGLDNDLKSVKLKSLPLLLKGYIPSLVKLPFFIYRLGKEVDWEDEQECLDGILREIALLYIPDMVPKVDTLDASLSEDEKAQFINRKEHISSLLEHVLFPCIKRRFLAPRHILKDVVEIANLPDLYKVFERC

SEQ ID NO: 254 - protein, 769 aa, Artificial sequence; identical to SEQ ID NO: 118
  hybrid human-yeast MLH1 protein with single amino acid variation

SEQ ID NO: 255 - protein, 769 aa, Artificial sequence
  hybrid human-yeast MLH1 protein with single amino acid variation
MSLRIKALDASVVNKIAAGEIIISPVNALKEMMENSIDAPSTSIQVIVKEGGLKLIQIQDNGTGIRKEDLDIVCERFTTSKLQKFEDLSQIQTYGFRGEALASISHVARVTVTTKVKEDRCAWRVSYAEGKMLESPKPVAGKDGTTILVEDLFFNIPSRLRALRSHNDEYSKILDVVGRYAIHSKDIGFSCKKFGDSNYSLSVKPSYTVQDRIRTVFNKSVASNLITFHISKVEDLNLESVDGKVCNLNFISKKSISLIFFINNRLVTCDLLRRALNSVYSNYLPKGFRPFIYLGIVIDPAAVDVNVHPTKREVRFLSQDEIIEKIANQLHAELSAIDTSRTFKASSISTNKPESLIPFNDTIESDRNRKSLRQAQVVENSYTTANSQLRKAKRQENKLVRIDASQAKITSFLSSSQQFNFEGSSTKRQLSEPKVTNVSHSQEAEKLTLNESEQPRDANTINDNDLKDQPKKKQKLGDYKVPSIADDEKNALPISKDGYIRVPKERVNVNLTSIKKLREKVDDSIHRELTDIFANLNYVGVVDEERRLAAIQHDLKLFLIDYGSVCYELFYQIGLTDFANFGKINLQSTNVSDDIVLYNLLSEFDELNDDASKEKIISKIWDMSSMLNEYYSIELVNDGLDNDLKSVKLKSLPLLLKGYIPSLVKLPFFIYRLGKEVDWEDEQECLDGILREIALLYIPDMVPKVDTLDASLSEDEKAQFINRKEHISSLLEHVLFPCIKRRFLAPRHILKDVVEIANLPDLYKVFERC

SEQ ID NO: 256 - protein, 769 aa, Artificial sequence
  hybrid human-yeast MLH1 protein with single amino acid variation
MSLRIKALDASVVNKIAAGEIIISPVNALKEMMENSIDAQSTSIQVIVKEGGLKLIQIQDNGTGIRKEDLDIVCERFTTSKLQKFEDLSQIQTYGFRGEALASISHVARVTVTTKVKEDRCAWRVSYAEGKMLESPKPVAGKDGTTILVEDLFFNIPSRLRALRSHNDEYSKILDVVGRYAIHSKDIGFSCKKFGDSNYSLSVKPSYTVQDRIRTVFNKSVASNLITFHISKVEDLNLESVDGKVCNLNFISKKSISLIFFINNRLVTCDLLRRALNSVYSNYLPKGFRPFIYLGIVIDPAAVDVNVHPTKREVRFLSQDEIIEKIANQLHAELSAIDTSRTFKASSISTNKPESLIPFNDTIESDRNRKSLRQAQVVENSYTTANSQLRKAKRQENKLVRIDASQAKITSFLSSSQQFNFEGSSTKRQLSEPKVTNVSHSQEAEKLTLNESEQPRDANTINDNDLKDQPKKKQKLGDYKVPSIADDEKNALPISKDGYIRVPKERVNVNLTSIKKLREKVDDSIHRELTDIFANLNYVGVVDEERRLAAIQHDLKLFLIDYGSVCYELFYQIGLTDFANFGKINLQSTNVSDDIVLYNLLSEFDELNDDASKEKIISKIWDMSSMLNEYYSIELVNDGLDNDLKSVKLKSLPLLLKGYIPSLVKLPFFIYRLGKEVDWEDEQECLDGILREIALLYIPDMVPKVDTLDASLSEDEKAQFINRKEHISSLLEHVLFPCIKRRFLAPRHILKDVVEIANLPDLYKVFERC

SEQ ID NO: 257 - protein, 769 aa, Artificial sequence
  hybrid human-yeast MLH1 protein with single amino acid variation
MSLRIKALDASVVNKIAAGEIIISPVNALKEMMENSIDAWSTSIQVIVKEGGLKLIQIQDNGTGIRKEDLDIVCERFTTSKLQKFEDLSQIQTYGFRGEALASISHVARVTVTTKVKEDRCAWRVSYAEGKMLESPKPVAGKDGTTILVEDLFFNIPSRLRALRSHNDEYSKILDVVGRYAIHSKDIGFSCKKFGDSNYSLSVKPSYTVQDRIRTVFNKSVASNLITFHISKVEDLNLESVDGKVCNLNFISKKSISLIFFINNRLVTCDLLRRALNSVYSNYLPKGFRPFIYLGIVIDPAAVDVNVHPTKREVRFLSQDEIIEKIANQLHAELSAIDTSRTFKASSISTNKPESLIPFNDTIESDRNRKSLRQAQVVENSYTTANSQLRKAKRQENKLVRIDASQAKITSFLSSSQQFNFEGSSTKRQLSEPKVTNVSHSQEAEKLTLNESEQPRDANTINDNDLKDQPKKKQKLGDYKVPSIADDEKNALPISKDGYIRVPKERVNVNLTSIKKLREKVDDSIHRELTDIFANLNYVGVVDEERRLAAIQHDLKLFLIDYGSVCYELFYQIGLTDFANFGKINLQSTNVSDDIVLYNLLSEFDELNDDASKEKIISKIWDMSSMLNEYYSIELVNDGLDNDLKSVKLKSLPLLLKGYIPSLVKLPFFIYRLGKEVDWEDEQECLDGILREIALLYIPDMVPKVDTLDASLSEDEKAQFINRKEHISSLLEHVLFPCIKRRFLAPRHILKDVVEIANLPDLYKVFERC

SEQ ID NO: 258 - DNA, 28 bp, Artificial sequence
  oligonucleotide
ctgaacctataaccatgtaatagtcgcc

SEQ ID NO: 259 - DNA, 28 bp, Artificial sequence
  oligonucleotide
ctgaacctataaccatgtaatagtcgcc

SEQ ID NO: 260 - DNA, 28 bp, Artificial sequence
  oligonucleotide
ctgaacctataaccatgtaatagtcgcc

SEQ ID NO: 261 - DNA, 33 bp, Artificial sequence
  oligonucleotide
cagctaaattgttgcaaccaaatggattttgtg

SEQ ID NO: 262 - protein, 756 aa, Homo sapiens
MSFVAGVIRRLDETVVNRIAAGDVIQRPANAIKEMIENCLDAKSTSIQVIVKEGGLKLIQIQDNGTGIRKEDLDIVCERFTTSKLQSFEDLASISTYGFRGEALASISHVAHVTITTKTADGKCAYRASYSDGKLKAPPKPCAGNQGTQITVEDLFYNIATRRKALKNPSEEYGKILEVVGRYSVHNAGISFSVKKQGETVADVRTLPNASTVDNIRSVFGNAVSRELIEIGCEDKTLAFKMNGYISNANYSVKKCIFLLFINHRLVESTSLRKAIETVYAAYLPKNTHPFLYLSLEISPQNVDVNVHPTKHEVHFLHEESILERVQQHIESKLLGSNSSRMYFTQTLLPGLAGPSGEMVKSTTSLTSSSTSGSSDKVYAHQMVRTDSREQKLDAFLQPLSKPLSSQPQAIVTEDKTDISSGRARQQDEEMLELPAPAEVAAKNQSLEGDTTKGTSEMSEKRGPTSSNPRKRHREDSDVEMVEDDSRKEMTAACTPRRRIINLTSVLSLQEEINEQGHEVLREMLHNHSFVGCVNPQWALAQHQTKLYLLNTTKLSEELFYQILIYDFANFGVLRLSEPAPLFDLAMLALDSPESGWTEEDGPKEGLAEYIVEFLKKKAEMLADYFSLEIDEEGNLIGLPLLIDNYVPPLEGLPIFILRLATEVNWDEEKECFESLSKECAMFYSIRKQYISEESTLSGQQSEVPGSIPNSWKWTVEHIVYKALRSHILPPKHFTEDGNILQLANLPDLYKVFERC

SEQ ID NO: 263 - protein, 756 aa, Homo sapiens
MSFVAGVIRRLDETVVNRIAAGEVIQRPINAIKEMIENCLDAKSTSIQVIVKEGGLKLIQIQDNGTGIRKEDLDIVCERFTTSKLQSFEDLASISTYGFRGEALASISHVAHVTITTKTADGKCAYRASYSDGKLKAPPKPCAGNQGTQITVEDLFYNIATRRKALKNPSEEYGKILEVVGRYSVHNAGISFSVKKQGETVADVRTLPNASTVDNIRSVFGNAVSRELIEIGCEDKTLAFKMNGYISNANYSVKKCIFLLFINHRLVESTSLRKAIETVYAAYLPKNTHPFLYLSLEISPQNVDVNVHPTKHEVHFLHEESILERVQQHIESKLLGSNSSRMYFTQTLLPGLAGPSGEMVKSTTSLTSSSTSGSSDKVYAHQMVRTDSREQKLDAFLQPLSKPLSSQPQAIVTEDKTDISSGRARQQDEEMLELPAPAEVAAKNQSLEGDTTKGTSEMSEKRGPTSSNPRKRHREDSDVEMVEDDSRKEMTAACTPRRRIINLTSVLSLQEEINEQGHEVLREMLHNHSFVGCVNPQWALAQHQTKLYLLNTTKLSEELFYQILIYDFANFGVLRLSEPAPLFDLAMLALDSPESGWTEEDGPKEGLAEYIVEFLKKKAEMLADYFSLEIDEEGNLIGLPLLIDNYVPPLEGLPIFILRLATEVNWDEEKECFESLSKECAMFYSIRKQYISEESTLSGQQSEVPGSIPNSWKWTVEHIVYKALRSHILPPKHFTEDGNILQLANLPDLYKVFERC

SEQ ID NO: 264 - protein, 756 aa, Homo sapiens
MSFVAGVIRRLDETVVNRIAAGEVIQRPANAIKEMIETCLDAKSTSIQVIVKEGGLKLIQIQDNGTGIRKEDLDIVCERFTTSKLQSFEDLASISTYGFRGEALASISHVAHVTITTKTADGKCAYRASYSDGKLKAPPKPCAGNQGTQITVEDLFYNIATRRKALKNPSEEYGKILEVVGRYSVHNAGISFSVKKQGETVADVRTLPNASTVDNIRSVFGNAVSRELIEIGCEDKTLAFKMNGYISNANYSVKKCIFLLFINHRLVESTSLRKAIETVYAAYLPKNTHPFLYLSLEISPQNVDVNVHPTKHEVHFLHEESILERVQQHIESKLLGSNSSRMYFTQTLLPGLAGPSGEMVKSTTSLTSSSTSGSSDKVYAHQMVRTDSREQKLDAFLQPLSKPLSSQPQAIVTEDKTDISSGRARQQDEEMLELPAPAEVAAKNQSLEGDTTKGTSEMSEKRGPTSSNPRKRHREDSDVEMVEDDSRKEMTAACTPRRRIINLTSVLSLQEEINEQGHEVLREMLHNHSFVGCVNPQWALAQHQTKLYLLNTTKLSEELFYQILIYDFANFGVLRLSEPAPLFDLAMLALDSPESGWTEEDGPKEGLAEYIVEFLKKKAEMLADYFSLEIDEEGNLIGLPLLIDNYVPPLEGLPIFILRLATEVNWDEEKECFESLSKECAMFYSIRKQYISEESTLSGQQSEVPGSIPNSWKWTVEHIVYKALRSHILPPKHFTEDGNILQLANLPDLYKVFERC

SEQ ID NO: 265 - protein, 756 aa, Homo sapiens
MSFVAGVIRRLDETVVNRIAAGEVIQRPANAIKEMIENCFDAKSTSIQVIVKEGGLKLIQIQDNGTGIRKEDLDIVCERFTTSKLQSFEDLASISTYGFRGEALASISHVAHVTITTKTADGKCAYRASYSDGKLKAPPKPCAGNQGTQITVEDLFYNIATRRKALKNPSEEYGKILEVVGRYSVHNAGISFSVKKQGETVADVRTLPNASTVDNIRSVFGNAVSRELIEIGCEDKTLAFKMNGYISNANYSVKKCIFLLFINHRLVESTSLRKAIETVYAAYLPKNTHPFLYLSLEISPQNVDVNVHPTKHEVHFLHEESILERVQQHIESKLLGSNSSRMYFTQTLLPGLAGPSGEMVKSTTSLTSSSTSGSSDKVYAHQMVRTDSREQKLDAFLQPLSKPLSSQPQAIVTEDKTDISSGRARQQDEEMLELPAPAEVAAKNQSLEGDTTKGTSEMSEKRGPTSSNPRKRHREDSDVEMVEDDSRKEMTAACTPRRRIINLTSVLSLQEEINEQGHEVLREMLHNHSFVGCVNPQWALAQHQTKLYLLNTTKLSEELFYQILIYDFANFGVLRLSEPAPLFDLAMLALDSPESGWTEEDGPKEGLAEYIVEFLKKKAEMLADYFSLEIDEEGNLIGLPLLIDNYVPPLEGLPIFILRLATEVNWDEEKECFESLSKECAMFYSIRKQYISEESTLSGQQSEVPGSIPNSWKWTVEHIVYKALRSHILPPKHFTEDGNILQLANLPDLYKVFERC

SEQ ID NO: 266 - protein, 756 aa, Homo sapiens
MSFVAGVIRRLDETVVNRIAAGEVIQRPANAIKEMIENCNDAKSTSIQVIVKEGGLKLIQIQDNGTGIRKEDLDIVCERFTTSKLQSFEDLASISTYGFRGEALASISHVAHVTITTKTADGKCAYRASYSDGKLKAPPKPCAGNQGTQITVEDLFYNIATRRKALKNPSEEYGKILEVVGRYSVHNAGISFSVKKQGETVADVRTLPNASTVDNIRSVFGNAVSRELIEIGCEDKTLAFKMNGYISNANYSVKKCIFLLFINHRLVESTSLRKAIETVYAAYLPKNTHPFLYLSLEISPQNVDVNVHPTKHEVHFLHEESILERVQQHIESKLLGSNSSRMYFTQTLLPGLAGPSGEMVKSTTSLTSSSTSGSSDKVYAHQMVRTDSREQKLDAFLQPLSKPLSSQPQAIVTEDKTDISSGRARQQDEEMLELPAPAEVAAKNQSLEGDTTKGTSEMSEKRGPTSSNPRKRHREDSDVEMVEDDSRKEMTAACTPRRRIINLTSVLSLQEEINEQGHEVLREMLHNHSFVGCVNPQWALAQHQTKLYLLNTTKLSEELFYQILIYDFANFGVLRLSEPAPLFDLAMLALDSPESGWTEEDGPKEGLAEYIVEFLKKKAEMLADYFSLEIDEEGNLIGLPLLIDNYVPPLEGLPIFILRLATEVNWDEEKECFESLSKECAMFYSIRKQYISEESTLSGQQSEVPGSIPNSWKWTVEHIVYKALRSHILPPKHFTEDGNILQLANLPDLYKVFERC

SEQ ID NO: 267 - protein, 756 aa, Homo sapiens
MSFVAGVIRRLDETVVNRIAAGEVIQRPANAIKEMIENCTDAKSTSIQVIVKEGGLKLIQIQDNGTGIRKEDLDIVCERFTTSKLQSFEDLASISTYGFRGEALASISHVAHVTITTKTADGKCAYRASYSDGKLKAPPKPCAGNQGTQITVEDLFYNIATRRKALKNPSEEYGKILEVVGRYSVHNAGISFSVKKQGETVADVRTLPNASTVDNIRSVFGNAVSRELIEIGCEDKTLAFKMNGYISNANYSVKKCIFLLFINHRLVESTSLRKAIETVYAAYLPKNTHPFLYLSLEISPQNVDVNVHPTKHEVHFLHEESILERVQQHIESKLLGSNSSRMYFTQTLLPGLAGPSGEMVKSTTSLTSSSTSGSSDKVYAHQMVRTDSREQKLDAFLQPLSKPLSSQPQAIVTEDKTDISSGRARQQDEEMLELPAPAEVAAKNQSLEGDTTKGTSEMSEKRGPTSSNPRKRHREDSDVEMVEDDSRKEMTAACTPRRRIINLTSVLSLQEEINEQGHEVLREMLHNHSFVGCVNPQWALAQHQTKLYLLNTTKLSEELFYQILIYDFANFGVLRLSEPAPLFDLAMLALDSPESGWTEEDGPKEGLAEYIVEFLKKKAEMLADYFSLEIDEEGNLIGLPLLIDNYVPPLEGLPIFILRLATEVNWDEEKECFESLSKECAMFYSIRKQYISEESTLSGQQSEVPGSIPNSWKWTVEHIVYKALRSHILPPKHFTEDGNILQLANLPDLYKVFERC

SEQ ID NO: 268 - protein, 756 aa, Homo sapiens
MSFVAGVIRRLDETVVNRIAAGEVIQRPANAIKEMIENCLEAKSTSIQVIVKEGGLKLIQIQDNGTGIRKEDLDIVCERFTTSKLQSFEDLASISTYGFRGEALASISHVAHVTITTKTADGKCAYRASYSDGKLKAPPKPCAGNQGTQITVEDLFYNIATRRKALKNPSEEYGKILEVVGRYSVHNAGISFSVKKQGETVADVRTLPNASTVDNIRSVFGNAVSRELIEIGCEDKTLAFKMNGYISNANYSVKKCIFLLFINHRLVESTSLRKAIETVYAAYLPKNTHPFLYLSLEISPQNVDVNVHPTKHEVHFLHEESILERVQQHIESKLLGSNSSRMYFTQTLLPGLAGPSGEMVKSTTSLTSSSTSGSSDKVYAHQMVRTDSREQKLDAFLQPLSKPLSSQPQAIVTEDKTDISSGRARQQDEEMLELPAPAEVAAKNQSLEGDTTKGTSEMSEKRGPTSSNPRKRHREDSDVEMVEDDSRKEMTAACTPRRRIINLTSVLSLQEEINEQGHEVLREMLHNHSFVGCVNPQWALAQHQTKLYLLNTTKLSEELFYQILIYDFANFGVLRLSEPAPLFDLAMLALDSPESGWTEEDGPKEGLAEYIVEFLKKKAEMLADYFSLEIDEEGNLIGLPLLIDNYVPPLEGLPIFILRLATEVNWDEEKECFESLSKECAMFYSIRKQYISEESTLSGQQSEVPGSIPNSWKWTVEHIVYKALRSHILPPKHFTEDGNILQLANLPDLYKVFERC

SEQ ID NO: 269 - protein, 756 aa, Homo sapiens
MSFVAGVIRRLDETVVNRIAAGEVIQRPANAIKEMIENCLGAKSTSIQVIVKEGGLKLIQIQDNGTGIRKEDLDIVCERFTTSKLQSFEDLASISTYGFRGEALASISHVAHVTITTKTADGKCAYRASYSDGKLKAPPKPCAGNQGTQITVEDLFYNIATRRKALKNPSEEYGKILEVVGRYSVHNAGISFSVKKQGETVADVRTLPNASTVDNIRSVFGNAVSRELIEIGCEDKTLAFKMNGYISNANYSVKKCIFLLFINHRLVESTSLRKAIETVYAAYLPKNTHPFLYLSLEISPQNVDVNVHPTKHEVHFLHEESILERVQQHIESKLLGSNSSRMYFTQTLLPGLAGPSGEMVKSTTSLTSSSTSGSSDKVYAHQMVRTDSREQKLDAFLQPLSKPLSSQPQAIVTEDKTDISSGRARQQDEEMLELPAPAEVAAKNQSLEGDTTKGTSEMSEKRGPTSSNPRKRHREDSDVEMVEDDSRKEMTAACTPRRRIINLTSVLSLQEEINEQGHEVLREMLHNHSFVGCVNPQWALAQHQTKLYLLNTTKLSEELFYQILIYDFANFGVLRLSEPAPLFDLAMLALDSPESGWTEEDGPKEGLAEYIVEFLKKKAEMLADYFSLEIDEEGNLIGLPLLIDNYVPPLEGLPIFILRLATEVNWDEEKECFESLSKECAMFYSIRKQYISEESTLSGQQSEVPGSIPNSWKWTVEHIVYKALRSHILPPKHFTEDGNILQLANLPDLYKVFERC

SEQ ID NO: 270 - protein, 756 aa, Homo sapiens
MSFVAGVIRRLDETVVNRIAAGEVIQRPANAIKEMIENCLNAKSTSIQVIVKEGGLKLIQIQDNGTGIRKEDLDIVCERFTTSKLQSFEDLASISTYGFRGEALASISHVAHVTITTKTADGKCAYRASYSDGKLKAPPKPCAGNQGTQITVEDLFYNIATRRKALKNPSEEYGKILEVVGRYSVHNAGISFSVKKQGETVADVRTLPNASTVDNIRSVFGNAVSRELIEIGCEDKTLAFKMNGYISNANYSVKKCIFLLFINHRLVESTSLRKAIETVYAAYLPKNTHPFLYLSLEISPQNVDVNVHPTKHEVHFLHEESILERVQQHIESKLLGSNSSRMYFTQTLLPGLAGPSGEMVKSTTSLTSSSTSGSSDKVYAHQMVRTDSREQKLDAFLQPLSKPLSSQPQAIVTEDKTDISSGRARQQDEEMLELPAPAEVAAKNQSLEGDTTKGTSEMSEKRGPTSSNPRKRHREDSDVEMVEDDSRKEMTAACTPRRRIINLTSVLSLQEEINEQGHEVLREMLHNHSFVGCVNPQWALAQHQTKLYLLNTTKLSEELFYQILIYDFANFGVLRLSEPAPLFDLAMLALDSPESGWTEEDGPKEGLAEYIVEFLKKKAEMLADYFSLEIDEEGNLIGLPLLIDNYVPPLEGLPIFILRLATEVNWDEEKECFESLSKECAMFYSIRKQYISEESTLSGQQSEVPGSIPNSWKWTVEHIVYKALRSHILPPKHFTEDGNILQLANLPDLYKVFERC

SEQ ID NO: 271 - protein, 756 aa, Homo sapiens
MSFVAGVIRRLDETVVNRIAAGEVIQRPANAIKEMIENCLDEKSTSIQVIVKEGGLKLIQIQDNGTGIRKEDLDIVCERFTTSKLQSFEDLASISTYGFRGEALASISHVAHVTITTKTADGKCAYRASYSDGKLKAPPKPCAGNQGTQITVEDLFYNIATRRKALKNPSEEYGKILEVVGRYSVHNAGISFSVKKQGETVADVRTLPNASTVDNIRSVFGNAVSRELIEIGCEDKTLAFKMNGYISNANYSVKKCIFLLFINHRLVESTSLRKAIETVYAAYLPKNTHPFLYLSLEISPQNVDVNVHPTKHEVHFLHEESILERVQQHIESKLLGSNSSRMYFTQTLLPGLAGPSGEMVKSTTSLTSSSTSGSSDKVYAHQMVRTDSREQKLDAFLQPLSKPLSSQPQAIVTEDKTDISSGRARQQDEEMLELPAPAEVAAKNQSLEGDTTKGTSEMSEKRGPTSSNPRKRHREDSDVEMVEDDSRKEMTAACTPRRRIINLTSVLSLQEEINEQGHEVLREMLHNHSFVGCVNPQWALAQHQTKLYLLNTTKLSEELFYQILIYDFANFGVLRLSEPAPLFDLAMLALDSPESGWTEEDGPKEGLAEYIVEFLKKKAEMLADYFSLEIDEEGNLIGLPLLIDNYVPPLEGLPIFILRLATEVNWDEEKECFESLSKECAMFYSIRKQYISEESTLSGQQSEVPGSIPNSWKWTVEHIVYKALRSHILPPKHFTEDGNILQLANLPDLYKVFERC

SEQ ID NO: 272 - protein, 576 aa, Homo sapiens
GRYSVHNAGISFSVKKQGETVADVRTLPNASTVDNIRSVFGNAVSRELIEIGCEDKTLAFKMNGYISNANYSVKKCIFLLFINHRLVESTSLRKAIETVYAAYLPKNTHPFLYLSLEISPQNVDVNVHPTKHEVHFLHEESILERVQQHIESKLLGSNSSRMYFTQTLLPGLAGPSGEMVKSTTSLTSSSTSGSSDKVYAHQMVRTDSREQKLDAFLQPLSKPLSSQPQAIVTEDKTDISSGRARQQDEEMLELPAPAEVAAKNQSLEGDTTKGTSEMSEKRGPTSSNPRKRHREDSDVEMVEDDSRKEMTAACTPRRRIINLTSVLSLQEEINEQGHEVLREMLHNHSFVGCVNPQWALAQHQTKLYLLNTTKLSEELFYQILIYDFANFGVLRLSEPAPLFDLAMLALDSPESGWTEEDGPKEGLAEYIVEFLKKKAEMLADYFSLEIDEEGNLIGLPLLIDNYVPPLEGLPIFILRLATEVNWDEEKECFESLSKECAMFYSIRKQYISEESTLSGQQSEVPGSIPNSWKWTVEHIVYKALRSHILPPKHFTEDGNILQLANLPDLYKVFERC

SEQ ID NO: 273 - protein, 756 aa, Homo sapiens
MSFVAGVIRRLDETVVNRIAAGEVIQRPANAIKEMIENCLDVKSTSIQVIVKEGGLKLIQIQDNGTGIRKEDLDIVCERFTTSKLQSFEDLASISTYGFRGEALASISHVAHVTITTKTADGKCAYRASYSDGKLKAPPKPCAGNQGTQITVEDLFYNIATRRKALKNPSEEYGKILEVVGRYSVHNAGISFSVKKQGETVADVRTLPNASTVDNIRSVFGNAVSRELIEIGCEDKTLAFKMNGYISNANYSVKKCIFLLFINHRLVESTSLRKAIETVYAAYLPKNTHPFLYLSLEISPQNVDVNVHPTKHEVHFLHEESILERVQQHIESKLLGSNSSRMYFTQTLLPGLAGPSGEMVKSTTSLTSSSTSGSSDKVYAHQMVRTDSREQKLDAFLQPLSKPLSSQPQAIVTEDKTDISSGRARQQDEEMLELPAPAEVAAKNQSLEGDTTKGTSEMSEKRGPTSSNPRKRHREDSDVEMVEDDSRKEMTAACTPRRRIINLTSVLSLQEEINEQGHEVLREMLHNHSFVGCVNPQWALAQHQTKLYLLNTTKLSEELFYQILIYDFANFGVLRLSEPAPLFDLAMLALDSPESGWTEEDGPKEGLAEYIVEFLKKKAEMLADYFSLEIDEEGNLIGLPLLIDNYVPPLEGLPIFILRLATEVNWDEEKECFESLSKECAMFYSIRKQYISEESTLSGQQSEVPGSIPNSWKWTVEHIVYKALRSHILPPKHFTEDGNILQLANLPDLYKVFERC

SEQ ID NO: 274 - protein, 756 aa, Homo sapiens
MSFVAGVIRRLDETVVNRIAAGEVIQRPANAIKEMIENCLDAASTSIQVIVKEGGLKLIQIQDNGTGIRKEDLDIVCERFTTSKLQSFEDLASISTYGFRGEALASISHVAHVTITTKTADGKCAYRASYSDGKLKAPPKPCAGNQGTQITVEDLFYNIATRRKALKNPSEEYGKILEVVGRYSVHNAGISFSVKKQGETVADVRTLPNASTVDNIRSVFGNAVSRELIEIGCEDKTLAFKMNGYISNANYSVKKCIFLLFINHRLVESTSLRKAIETVYAAYLPKNTHPFLYLSLEISPQNVDVNVHPTKHEVHFLHEESILERVQQHIESKLLGSNSSRMYFTQTLLPGLAGPSGEMVKSTTSLTSSSTSGSSDKVYAHQMVRTDSREQKLDAFLQPLSKPLSSQPQAIVTEDKTDISSGRARQQDEEMLELPAPAEVAAKNQSLEGDTTKGTSEMSEKRGPTSSNPRKRHREDSDVEMVEDDSRKEMTAACTPRRRIINLTSVLSLQEEINEQGHEVLREMLHNHSFVGCVNPQWALAQHQTKLYLLNTTKLSEELFYQILIYDFANFGVLRLSEPAPLFDLAMLALDSPESGWTEEDGPKEGLAEYIVEFLKKKAEMLADYFSLEIDEEGNLIGLPLLIDNYVPPLEGLPIFILRLATEVNWDEEKECFESLSKECAMFYSIRKQYISEESTLSGQQSEVPGSIPNSWKWTVEHIVYKALRSHILPPKHFTEDGNILQLANLPDLYKVFERC

SEQ ID NO: 275 - protein, 756 aa, Homo sapiens
MSFVAGVIRRLDETVVNRIAAGEVIQRPANAIKEMIENCLDADSTSIQVIVKEGGLKLIQIQDNGTGIRKEDLDIVCERFTTSKLQSFEDLASISTYGFRGEALASISHVAHVTITTKTADGKCAYRASYSDGKLKAPPKPCAGNQGTQITVEDLFYNIATRRKALKNPSEEYGKILEVVGRYSVHNAGISFSVKKQGETVADVRTLPNASTVDNIRSVFGNAVSRELIEIGCEDKTLAFKMNGYISNANYSVKKCIFLLFINHRLVESTSLRKAIETVYAAYLPKNTHPFLYLSLEISPQNVDVNVHPTKHEVHFLHEESILERVQQHIESKLLGSNSSRMYFTQTLLPGLAGPSGEMVKSTTSLTSSSTSGSSDKVYAHQMVRTDSREQKLDAFLQPLSKPLSSQPQAIVTEDKTDISSGRARQQDEEMLELPAPAEVAAKNQSLEGDTTKGTSEMSEKRGPTSSNPRKRHREDSDVEMVEDDSRKEMTAACTPRRRIINLTSVLSLQEEINEQGHEVLREMLHNHSFVGCVNPQWALAQHQTKLYLLNTTKLSEELFYQILIYDFANFGVLRLSEPAPLFDLAMLALDSPESGWTEEDGPKEGLAEYIVEFLKKKAEMLADYFSLEIDEEGNLIGLPLLIDNYVPPLEGLPIFILRLATEVNWDEEKECFESLSKECAMFYSIRKQYISEESTLSGQQSEVPGSIPNSWKWTVEHIVYKALRSHILPPKHFTEDGNILQLANLPDLYKVFERC

SEQ ID NO: 276 - protein, 756 aa, Homo sapiens
MSFVAGVIRRLDETVVNRIAAGEVIQRPANAIKEMIENCLDAESTSIQVIVKEGGLKLIQIQDNGTGIRKEDLDIVCERFTTSKLQSFEDLASISTYGFRGEALASISHVAHVTITTKTADGKCAYRASYSDGKLKAPPKPCAGNQGTQITVEDLFYNIATRRKALKNPSEEYGKILEVVGRYSVHNAGISFSVKKQGETVADVRTLPNASTVDNIRSVFGNAVSRELIEIGCEDKTLAFKMNGYISNANYSVKKCIFLLFINHRLVESTSLRKAIETVYAAYLPKNTHPFLYLSLEISPQNVDVNVHPTKHEVHFLHEESILERVQQHIESKLLGSNSSRMYFTQTLLPGLAGPSGEMVKSTTSLTSSSTSGSSDKVYAHQMVRTDSREQKLDAFLQPLSKPLSSQPQAIVTEDKTDISSGRARQQDEEMLELPAPAEVAAKNQSLEGDTTKGTSEMSEKRGPTSSNPRKRHREDSDVEMVEDDSRKEMTAACTPRRRIINLTSVLSLQEEINEQGHEVLREMLHNHSFVGCVNPQWALAQHQTKLYLLNTTKLSEELFYQILIYDFANFGVLRLSEPAPLFDLAMLALDSPESGWTEEDGPKEGLAEYIVEFLKKKAEMLADYFSLEIDEEGNLIGLPLLIDNYVPPLEGLPIFILRLATEVNWDEEKECFESLSKECAMFYSIRKQYISEESTLSGQQSEVPGSIPNSWKWTVEHIVYKALRSHILPPKHFTEDGNILQLANLPDLYKVFERC

SEQ ID NO: 277 - protein, 756 aa, Homo sapiens
MSFVAGVIRRLDETVVNRIAAGEVIQRPANAIKEMIENCLDAFSTSIQVIVKEGGLKLIQIQDNGTGIRKEDLDIVCERFTTSKLQSFEDLASISTYGFRGEALASISHVAHVTITTKTADGKCAYRASYSDGKLKAPPKPCAGNQGTQITVEDLFYNIATRRKALKNPSEEYGKILEVVGRYSVHNAGISFSVKKQGETVADVRTLPNASTVDNIRSVFGNAVSRELIEIGCEDKTLAFKMNGYISNANYSVKKCIFLLFINHRLVESTSLRKAIETVYAAYLPKNTHPFLYLSLEISPQNVDVNVHPTKHEVHFLHEESILERVQQHIESKLLGSNSSRMYFTQTLLPGLAGPSGEMVKSTTSLTSSSTSGSSDKVYAHQMVRTDSREQKLDAFLQPLSKPLSSQPQAIVTEDKTDISSGRARQQDEEMLELPAPAEVAAKNQSLEGDTTKGTSEMSEKRGPTSSNPRKRHREDSDVEMVEDDSRKEMTAACTPRRRIINLTSVLSLQEEINEQGHEVLREMLHNHSFVGCVNPQWALAQHQTKLYLLNTTKLSEELFYQILIYDFANFGVLRLSEPAPLFDLAMLALDSPESGWTEEDGPKEGLAEYIVEFLKKKAEMLADYFSLEIDEEGNLIGLPLLIDNYVPPLEGLPIFILRLATEVNWDEEKECFESLSKECAMFYSIRKQYISEESTLSGQQSEVPGSIPNSWKWTVEHIVYKALRSHILPPKHFTEDGNILQLANLPDLYKVFERC

SEQ ID NO: 278 - protein, 756 aa, Homo sapiens
MSFVAGVIRRLDETVVNRIAAGEVIQRPANAIKEMIENCLDAHSTSIQVIVKEGGLKLIQIQDNGTGIRKEDLDIVCERFTTSKLQSFEDLASISTYGFRGEALASISHVAHVTITTKTADGKCAYRASYSDGKLKAPPKPCAGNQGTQITVEDLFYNIATRRKALKNPSEEYGKILEVVGRYSVHNAGISFSVKKQGETVADVRTLPNASTVDNIRSVFGNAVSRELIEIGCEDKTLAFKMNGYISNANYSVKKCIFLLFINHRLVESTSLRKAIETVYAAYLPKNTHPFLYLSLEISPQNVDVNVHPTKHEVHFLHEESILERVQQHIESKLLGSNSSRMYFTQTLLPGLAGPSGEMVKSTTSLTSSSTSGSSDKVYAHQMVRTDSREQKLDAFLQPLSKPLSSQPQAIVTEDKTDISSGRARQQDEEMLELPAPAEVAAKNQSLEGDTTKGTSEMSEKRGPTSSNPRKRHREDSDVEMVEDDSRKEMTAACTPRRRIINLTSVLSLQEEINEQGHEVLREMLHNHSFVGCVNPQWALAQHQTKLYLLNTTKLSEELFYQILIYDFANFGVLRLSEPAPLFDLAMLALDSPESGWTEEDGPKEGLAEYIVEFLKKKAEMLADYFSLEIDEEGNLIGLPLLIDNYVPPLEGLPIFILRLATEVNWDEEKECFESLSKECAMFYSIRKQYISEESTLSGQQSEVPGSIPNSWKWTVEHIVYKALRSHILPPKHFTEDGNILQLANLPDLYKVFERC

SEQ ID NO: 279 - protein, 756 aa, Homo sapiens
MSFVAGVIRRLDETVVNRIAAGEVIQRPANAIKEMIENCLDAISTSIQVIVKEGGLKLIQIQDNGTGIRKEDLDIVCERFTTSKLQSFEDLASISTYGFRGEALASISHVAHVTITTKTADGKCAYRASYSDGKLKAPPKPCAGNQGTQITVEDLFYNIATRRKALKNPSEEYGKILEVVGRYSVHNAGISFSVKKQGETVADVRTLPNASTVDNIRSVFGNAVSRELIEIGCEDKTLAFKMNGYISNANYSVKKCIFLLFINHRLVESTSLRKAIETVYAAYLPKNTHPFLYLSLEISPQNVDVNVHPTKHEVHFLHEESILERVQQHIESKLLGSNSSRMYFTQTLLPGLAGPSGEMVKSTTSLTSSSTSGSSDKVYAHQMVRTDSREQKLDAFLQPLSKPLSSQPQAIVTEDKTDISSGRARQQDEEMLELPAPAEVAAKNQSLEGDTTKGTSEMSEKRGPTSSNPRKRHREDSDVEMVEDDSRKEMTAACTPRRRIINLTSVLSLQEEINEQGHEVLREMLHNHSFVGCVNPQWALAQHQTKLYLLNTTKLSEELFYQILIYDFANFGVLRLSEPAPLFDLAMLALDSPESGWTEEDGPKEGLAEYIVEFLKKKAEMLADYFSLEIDEEGNLIGLPLLIDNYVPPLEGLPIFILRLATEVNWDEEKECFESLSKECAMFYSIRKQYISEESTLSGQQSEVPGSIPNSWKWTVEHIVYKALRSHILPPKHFTEDGNILQLANLPDLYKVFERC

SEQ ID NO: 280 - protein, 756 aa, Homo sapiens
MSFVAGVIRRLDETVVNRIAAGEVIQRPANAIKEMIENCLDALSTSIQVIVKEGGLKLIQIQDNGTGIRKEDLDIVCERFTTSKLQSFEDLASISTYGFRGEALASISHVAHVTITTKTADGKCAYRASYSDGKLKAPPKPCAGNQGTQITVEDLFYNIATRRKALKNPSEEYGKILEVVGRYSVHNAGISFSVKKQGETVADVRTLPNASTVDNIRSVFGNAVSRELIEIGCEDKTLAFKMNGYISNANYSVKKCIFLLFINHRLVESTSLRKAIETVYAAYLPKNTHPFLYLSLEISPQNVDVNVHPTKHEVHFLHEESILERVQQHIESKLLGSNSSRMYFTQTLLPGLAGPSGEMVKSTTSLTSSSTSGSSDKVYAHQMVRTDSREQKLDAFLQPLSKPLSSQPQAIVTEDKTDISSGRARQQDEEMLELPAPAEVAAKNQSLEGDTTKGTSEMSEKRGPTSSNPRKRHREDSDVEMVEDDSRKEMTAACTPRRRIINLTSVLSLQEEINEQGHEVLREMLHNHSFVGCVNPQWALAQHQTKLYLLNTTKLSEELFYQILIYDFANFGVLRLSEPAPLFDLAMLALDSPESGWTEEDGPKEGLAEYIVEFLKKKAEMLADYFSLEIDEEGNLIGLPLLIDNYVPPLEGLPIFILRLATEVNWDEEKECFESLSKECAMFYSIRKQYISEESTLSGQQSEVPGSIPNSWKWTVEHIVYKALRSHILPPKHFTEDGNILQLANLPDLYKVFERC

SEQ ID NO: 281 - protein, 756 aa, Homo sapiens
MSFVAGVIRRLDETVVNRIAAGEVIQRPANAIKEMIENCLDAMSTSIQVIVKEGGLKLIQIQDNGTGIRKEDLDIVCERFTTSKLQSFEDLASISTYGFRGEALASISHVAHVTITTKTADGKCAYRASYSDGKLKAPPKPCAGNQGTQITVEDLFYNIATRRKALKNPSEEYGKILEVVGRYSVHNAGISFSVKKQGETVADVRTLPNASTVDNIRSVFGNAVSRELIEIGCEDKTLAFKMNGYISNANYSVKKCIFLLFINHRLVESTSLRKAIETVYAAYLPKNTHPFLYLSLEISPQNVDVNVHPTKHEVHFLHEESILERVQQHIESKLLGSNSSRMYFTQTLLPGLAGPSGEMVKSTTSLTSSSTSGSSDKVYAHQMVRTDSREQKLDAFLQPLSKPLSSQPQAIVTEDKTDISSGRARQQDEEMLELPAPAEVAAKNQSLEGDTTKGTSEMSEKRGPTSSNPRKRHREDSDVEMVEDDSRKEMTAACTPRRRIINLTSVLSLQEEINEQGHEVLREMLHNHSFVGCVNPQWALAQHQTKLYLLNTTKLSEELFYQILIYDFANFGVLRLSEPAPLFDLAMLALDSPESGWTEEDGPKEGLAEYIVEFLKKKAEMLADYFSLEIDEEGNLIGLPLLIDNYVPPLEGLPIFILRLATEVNWDEEKECFESLSKECAMFYSIRKQYISEESTLSGQQSEVPGSIPNSWKWTVEHIVYKALRSHILPPKHFTEDGNILQLANLPDLYKVFERC

SEQ ID NO: 282 - protein, 756 aa, Homo sapiens
MSFVAGVIRRLDETVVNRIAAGEVIQRPANAIKEMIENCLDAPSTSIQVIVKEGGLKLIQIQDNGTGIRKEDLDIVCERFTTSKLQSFEDLASISTYGFRGEALASISHVAHVTITTKTADGKCAYRASYSDGKLKAPPKPCAGNQGTQITVEDLFYNIATRRKALKNPSEEYGKILEVVGRYSVHNAGISFSVKKQGETVADVRTLPNASTVDNIRSVFGNAVSRELIEIGCEDKTLAFKMNGYISNANYSVKKCIFLLFINHRLVESTSLRKAIETVYAAYLPKNTHPFLYLSLEISPQNVDVNVHPTKHEVHFLHEESILERVQQHIESKLLGSNSSRMYFTQTLLPGLAGPSGEMVKSTTSLTSSSTSGSSDKVYAHQMVRTDSREQKLDAFLQPLSKPLSSQPQAIVTEDKTDISSGRARQQDEEMLELPAPAEVAAKNQSLEGDTTKGTSEMSEKRGPTSSNPRKRHREDSDVEMVEDDSRKEMTAACTPRRRIINLTSVLSLQEEINEQGHEVLREMLHNHSFVGCVNPQWALAQHQTKLYLLNTTKLSEELFYQILIYDFANFGVLRLSEPAPLFDLAMLALDSPESGWTEEDGPKEGLAEYIVEFLKKKAEMLADYFSLEIDEEGNLIGLPLLIDNYVPPLEGLPIFILRLATEVNWDEEKECFESLSKECAMFYSIRKQYISEESTLSGQQSEVPGSIPNSWKWTVEHIVYKALRSHILPPKHFTEDGNILQLANLPDLYKVFERC

SEQ ID NO: 283 - protein, 756 aa, Homo sapiens
MSFVAGVIRRLDETVVNRIAAGEVIQRPANAIKEMIENCLDASSTSIQVIVKEGGLKLIQIQDNGTGIRKEDLDIVCERFTTSKLQSFEDLASISTYGFRGEALASISHVAHVTITTKTADGKCAYRASYSDGKLKAPPKPCAGNQGTQITVEDLFYNIATRRKALKNPSEEYGKILEVVGRYSVHNAGISFSVKKQGETVADVRTLPNASTVDNIRSVFGNAVSRELIEIGCEDKTLAFKMNGYISNANYSVKKCIFLLFINHRLVESTSLRKAIETVYAAYLPKNTHPFLYLSLEISPQNVDVNVHPTKHEVHFLHEESILERVQQHIESKLLGSNSSRMYFTQTLLPGLAGPSGEMVKSTTSLTSSSTSGSSDKVYAHQMVRTDSREQKLDAFLQPLSKPLSSQPQAIVTEDKTDISSGRARQQDEEMLELPAPAEVAAKNQSLEGDTTKGTSEMSEKRGPTSSNPRKRHREDSDVEMVEDDSRKEMTAACTPRRRIINLTSVLSLQEEINEQGHEVLREMLHNHSFVGCVNPQWALAQHQTKLYLLNTTKLSEELFYQILIYDFANFGVLRLSEPAPLFDLAMLALDSPESGWTEEDGPKEGLAEYIVEFLKKKAEMLADYFSLEIDEEGNLIGLPLLIDNYVPPLEGLPIFILRLATEVNWDEEKECFESLSKECAMFYSIRKQYISEESTLSGQQSEVPGSIPNSWKWTVEHIVYKALRSHILPPKHFTEDGNILQLANLPDLYKVFERC

SEQ ID NO: 284 - protein, 756 aa, Homo sapiens
MSFVAGVIRRLDETVVNRIAAGEVIQRPANAIKEMIENCLDATSTSIQVIVKEGGLKLIQIQDNGTGIRKEDLDIVCERFTTSKLQSFEDLASISTYGFRGEALASISHVAHVTITTKTADGKCAYRASYSDGKLKAPPKPCAGNQGTQITVEDLFYNIATRRKALKNPSEEYGKILEVVGRYSVHNAGISFSVKKQGETVADVRTLPNASTVDNIRSVFGNAVSRELIEIGCEDKTLAFKMNGYISNANYSVKKCIFLLFINHRLVESTSLRKAIETVYAAYLPKNTHPFLYLSLEISPQNVDVNVHPTKHEVHFLHEESILERVQQHIESKLLGSNSSRMYFTQTLLPGLAGPSGEMVKSTTSLTSSSTSGSSDKVYAHQMVRTDSREQKLDAFLQPLSKPLSSQPQAIVTEDKTDISSGRARQQDEEMLELPAPAEVAAKNQSLEGDTTKGTSEMSEKRGPTSSNPRKRHREDSDVEMVEDDSRKEMTAACTPRRRIINLTSVLSLQEEINEQGHEVLREMLHNHSFVGCVNPQWALAQHQTKLYLLNTTKLSEELFYQILIYDFANFGVLRLSEPAPLFDLAMLALDSPESGWTEEDGPKEGLAEYIVEFLKKKAEMLADYFSLEIDEEGNLIGLPLLIDNYVPPLEGLPIFILRLATEVNWDEEKECFESLSKECAMFYSIRKQYISEESTLSGQQSEVPGSIPNSWKWTVEHIVYKALRSHILPPKHFTEDGNILQLANLPDLYKVFERC

SEQ ID NO: 285 - protein, 756 aa, Homo sapiens
MSFVAGVIRRLDETVVNRIAAGEVIQRPANAIKEMIENCLDAVSTSIQVIVKEGGLKLIQIQDNGTGIRKEDLDIVCERFTTSKLQSFEDLASISTYGFRGEALASISHVAHVTITTKTADGKCAYRASYSDGKLKAPPKPCAGNQGTQITVEDLFYNIATRRKALKNPSEEYGKILEVVGRYSVHNAGISFSVKKQGETVADVRTLPNASTVDNIRSVFGNAVSRELIEIGCEDKTLAFKMNGYISNANYSVKKCIFLLFINHRLVESTSLRKAIETVYAAYLPKNTHPFLYLSLEISPQNVDVNVHPTKHEVHFLHEESILERVQQHIESKLLGSNSSRMYFTQTLLPGLAGPSGEMVKSTTSLTSSSTSGSSDKVYAHQMVRTDSREQKLDAFLQPLSKPLSSQPQAIVTEDKTDISSGRARQQDEEMLELPAPAEVAAKNQSLEGDTTKGTSEMSEKRGPTSSNPRKRHREDSDVEMVEDDSRKEMTAACTPRRRIINLTSVLSLQEEINEQGHEVLREMLHNHSFVGCVNPQWALAQHQTKLYLLNTTKLSEELFYQILIYDFANFGVLRLSEPAPLFDLAMLALDSPESGWTEEDGPKEGLAEYIVEFLKKKAEMLADYFSLEIDEEGNLIGLPLLIDNYVPPLEGLPIFILRLATEVNWDEEKECFESLSKECAMFYSIRKQYISEESTLSGQQSEVPGSIPNSWKWTVEHIVYKALRSHILPPKHFTEDGNILQLANLPDLYKVFERC

SEQ ID NO: 286 - protein, 756 aa, Homo sapiens
MSFVAGVIRRLDETVVNRIAAGEVIQRPANAIKEMIENCLDAWSTSIQVIVKEGGLKLIQIQDNGTGIRKEDLDIVCERFTTSKLQSFEDLASISTYGFRGEALASISHVAHVTITTKTADGKCAYRASYSDGKLKAPPKPCAGNQGTQITVEDLFYNIATRRKALKNPSEEYGKILEVVGRYSVHNAGISFSVKKQGETVADVRTLPNASTVDNIRSVFGNAVSRELIEIGCEDKTLAFKMNGYISNANYSVKKCIFLLFINHRLVESTSLRKAIETVYAAYLPKNTHPFLYLSLEISPQNVDVNVHPTKHEVHFLHEESILERVQQHIESKLLGSNSSRMYFTQTLLPGLAGPSGEMVKSTTSLTSSSTSGSSDKVYAHQMVRTDSREQKLDAFLQPLSKPLSSQPQAIVTEDKTDISSGRARQQDEEMLELPAPAEVAAKNQSLEGDTTKGTSEMSEKRGPTSSNPRKRHREDSDVEMVEDDSRKEMTAACTPRRRIINLTSVLSLQEEINEQGHEVLREMLHNHSFVGCVNPQWALAQHQTKLYLLNTTKLSEELFYQILIYDFANFGVLRLSEPAPLFDLAMLALDSPESGWTEEDGPKEGLAEYIVEFLKKKAEMLADYFSLEIDEEGNLIGLPLLIDNYVPPLEGLPIFILRLATEVNWDEEKECFESLSKECAMFYSIRKQYISEESTLSGQQSEVPGSIPNSWKWTVEHIVYKALRSHILPPKHFTEDGNILQLANLPDLYKVFERC

SEQ ID NO: 287 - protein, 756 aa, Homo sapiens
MSFVAGVIRRLDETVVNRIAAGEVIQRPANAIKEMIENCLDAYSTSIQVIVKEGGLKLIQIQDNGTGIRKEDLDIVCERFTTSKLQSFEDLASISTYGFRGEALASISHVAHVTITTKTADGKCAYRASYSDGKLKAPPKPCAGNQGTQITVEDLFYNIATRRKALKNPSEEYGKILEVVGRYSVHNAGISFSVKKQGETVADVRTLPNASTVDNIRSVFGNAVSRELIEIGCEDKTLAFKMNGYISNANYSVKKCIFLLFINHRLVESTSLRKAIETVYAAYLPKNTHPFLYLSLEISPQNVDVNVHPTKHEVHFLHEESILERVQQHIESKLLGSNSSRMYFTQTLLPGLAGPSGEMVKSTTSLTSSSTSGSSDKVYAHQMVRTDSREQKLDAFLQPLSKPLSSQPQAIVTEDKTDISSGRARQQDEEMLELPAPAEVAAKNQSLEGDTTKGTSEMSEKRGPTSSNPRKRHREDSDVEMVEDDSRKEMTAACTPRRRIINLTSVLSLQEEINEQGHEVLREMLHNHSFVGCVNPQWALAQHQTKLYLLNTTKLSEELFYQILIYDFANFGVLRLSEPAPLFDLAMLALDSPESGWTEEDGPKEGLAEYIVEFLKKKAEMLADYFSLEIDEEGNLIGLPLLIDNYVPPLEGLPIFILRLATEVNWDEEKECFESLSKECAMFYSIRKQYISEESTLSGQQSEVPGSIPNSWKWTVEHIVYKALRSHILPPKHFTEDGNILQLANLPDLYKVFERC

SEQ ID NO: 288 - protein, 756 aa, Homo sapiens
MSFVAGVIRRLDETVVNRIAAGEVIQRPANAIKEMIENCLDAKDTSIQVIVKEGGLKLIQIQDNGTGIRKEDLDIVCERFTTSKLQSFEDLASISTYGFRGEALASISHVAHVTITTKTADGKCAYRASYSDGKLKAPPKPCAGNQGTQITVEDLFYNIATRRKALKNPSEEYGKILEVVGRYSVHNAGISFSVKKQGETVADVRTLPNASTVDNIRSVFGNAVSRELIEIGCEDKTLAFKMNGYISNANYSVKKCIFLLFINHRLVESTSLRKAIETVYAAYLPKNTHPFLYLSLEISPQNVDVNVHPTKHEVHFLHEESILERVQQHIESKLLGSNSSRMYFTQTLLPGLAGPSGEMVKSTTSLTSSSTSGSSDKVYAHQMVRTDSREQKLDAFLQPLSKPLSSQPQAIVTEDKTDISSGRARQQDEEMLELPAPAEVAAKNQSLEGDTTKGTSEMSEKRGPTSSNPRKRHREDSDVEMVEDDSRKEMTAACTPRRRIINLTSVLSLQEEINEQGHEVLREMLHNHSFVGCVNPQWALAQHQTKLYLLNTTKLSEELFYQILIYDFANFGVLRLSEPAPLFDLAMLALDSPESGWTEEDGPKEGLAEYIVEFLKKKAEMLADYFSLEIDEEGNLIGLPLLIDNYVPPLEGLPIFILRLATEVNWDEEKECFESLSKECAMFYSIRKQYISEESTLSGQQSEVPGSIPNSWKWTVEHIVYKALRSHILPPKHFTEDGNILQLANLPDLYKVFERC

SEQ ID NO: 289 - protein, 756 aa, Homo sapiens
MSFVAGVIRRLDETVVNRIAAGEVIQRPANAIKEMIENCLDAKGTSIQVIVKEGGLKLIQIQDNGTGIRKEDLDIVCERFTTSKLQSFEDLASISTYGFRGEALASISHVAHVTITTKTADGKCAYRASYSDGKLKAPPKPCAGNQGTQITVEDLFYNIATRRKALKNPSEEYGKILEVVGRYSVHNAGISFSVKKQGETVADVRTLPNASTVDNIRSVFGNAVSRELIEIGCEDKTLAFKMNGYISNANYSVKKCIFLLFINHRLVESTSLRKAIETVYAAYLPKNTHPFLYLSLEISPQNVDVNVHPTKHEVHFLHEESILERVQQHIESKLLGSNSSRMYFTQTLLPGLAGPSGEMVKSTTSLTSSSTSGSSDKVYAHQMVRTDSREQKLDAFLQPLSKPLSSQPQAIVTEDKTDISSGRARQQDEEMLELPAPAEVAAKNQSLEGDTTKGTSEMSEKRGPTSSNPRKRHREDSDVEMVEDDSRKEMTAACTPRRRIINLTSVLSLQEEINEQGHEVLREMLHNHSFVGCVNPQWALAQHQTKLYLLNTTKLSEELFYQILIYDFANFGVLRLSEPAPLFDLAMLALDSPESGWTEEDGPKEGLAEYIVEFLKKKAEMLADYFSLEIDEEGNLIGLPLLIDNYVPPLEGLPIFILRLATEVNWDEEKECFESLSKECAMFYSIRKQYISEESTLSGQQSEVPGSIPNSWKWTVEHIVYKALRSHILPPKHFTEDGNILQLANLPDLYKVFERC

SEQ ID NO: 290 - protein, 756 aa, Homo sapiens
MSFVAGVIRRLDETVVNRIAAGEVIQRPANAIKEMIENCLDAKKTSIQVIVKEGGLKLIQIQDNGTGIRKEDLDIVCERFTTSKLQSFEDLASISTYGFRGEALASISHVAHVTITTKTADGKCAYRASYSDGKLKAPPKPCAGNQGTQITVEDLFYNIATRRKALKNPSEEYGKILEVVGRYSVHNAGISFSVKKQGETVADVRTLPNASTVDNIRSVFGNAVSRELIEIGCEDKTLAFKMNGYISNANYSVKKCIFLLFINHRLVESTSLRKAIETVYAAYLPKNTHPFLYLSLEISPQNVDVNVHPTKHEVHFLHEESILERVQQHIESKLLGSNSSRMYFTQTLLPGLAGPSGEMVKSTTSLTSSSTSGSSDKVYAHQMVRTDSREQKLDAFLQPLSKPLSSQPQAIVTEDKTDISSGRARQQDEEMLELPAPAEVAAKNQSLEGDTTKGTSEMSEKRGPTSSNPRKRHREDSDVEMVEDDSRKEMTAACTPRRRIINLTSVLSLQEEINEQGHEVLREMLHNHSFVGCVNPQWALAQHQTKLYLLNTTKLSEELFYQILIYDFANFGVLRLSEPAPLFDLAMLALDSPESGWTEEDGPKEGLAEYIVEFLKKKAEMLADYFSLEIDEEGNLIGLPLLIDNYVPPLEGLPIFILRLATEVNWDEEKECFESLSKECAMFYSIRKQYISEESTLSGQQSEVPGSIPNSWKWTVEHIVYKALRSHILPPKHFTEDGNILQLANLPDLYKVFERC

SEQ ID NO: 291 - protein, 756 aa, Homo sapiens
MSFVAGVIRRLDETVVNRIAAGEVIQRPANAIKEMIENCLDAKMTSIQVIVKEGGLKLIQIQDNGTGIRKEDLDIVCERFTTSKLQSFEDLASISTYGFRGEALASISHVAHVTITTKTADGKCAYRASYSDGKLKAPPKPCAGNQGTQITVEDLFYNIATRRKALKNPSEEYGKILEVVGRYSVHNAGISFSVKKQGETVADVRTLPNASTVDNIRSVFGNAVSRELIEIGCEDKTLAFKMNGYISNANYSVKKCIFLLFINHRLVESTSLRKAIETVYAAYLPKNTHPFLYLSLEISPQNVDVNVHPTKHEVHFLHEESILERVQQHIESKLLGSNSSRMYFTQTLLPGLAGPSGEMVKSTTSLTSSSTSGSSDKVYAHQMVRTDSREQKLDAFLQPLSKPLSSQPQAIVTEDKTDISSGRARQQDEEMLELPAPAEVAAKNQSLEGDTTKGTSEMSEKRGPTSSNPRKRHREDSDVEMVEDDSRKEMTAACTPRRRIINLTSVLSLQEEINEQGHEVLREMLHNHSFVGCVNPQWALAQHQTKLYLLNTTKLSEELFYQILIYDFANFGVLRLSEPAPLFDLAMLALDSPESGWTEEDGPKEGLAEYIVEFLKKKAEMLADYFSLEIDEEGNLIGLPLLIDNYVPPLEGLPIFILRLATEVNWDEEKECFESLSKECAMFYSIRKQYISEESTLSGQQSEVPGSIPNSWKWTVEHIVYKALRSHILPPKHFTEDGNILQLANLPDLYKVFERC

SEQ ID NO: 292 - protein, 756 aa, Homo sapiens
MSFVAGVIRRLDETVVNRIAAGEVIQRPANAIKEMIENCLDAKNTSIQVIVKEGGLKLIQIQDNGTGIRKEDLDIVCERFTTSKLQSFEDLASISTYGFRGEALASISHVAHVTITTKTADGKCAYRASYSDGKLKAPPKPCAGNQGTQITVEDLFYNIATRRKALKNPSEEYGKILEVVGRYSVHNAGISFSVKKQGETVADVRTLPNASTVDNIRSVFGNAVSRELIEIGCEDKTLAFKMNGYISNANYSVKKCIFLLFINHRLVESTSLRKAIETVYAAYLPKNTHPFLYLSLEISPQNVDVNVHPTKHEVHFLHEESILERVQQHIESKLLGSNSSRMYFTQTLLPGLAGPSGEMVKSTTSLTSSSTSGSSDKVYAHQMVRTDSREQKLDAFLQPLSKPLSSQPQAIVTEDKTDISSGRARQQDEEMLELPAPAEVAAKNQSLEGDTTKGTSEMSEKRGPTSSNPRKRHREDSDVEMVEDDSRKEMTAACTPRRRIINLTSVLSLQEEINEQGHEVLREMLHNHSFVGCVNPQWALAQHQTKLYLLNTTKLSEELFYQILIYDFANFGVLRLSEPAPLFDLAMLALDSPESGWTEEDGPKEGLAEYIVEFLKKKAEMLADYFSLEIDEEGNLIGLPLLIDNYVPPLEGLPIFILRLATEVNWDEEKECFESLSKECAMFYSIRKQYISEESTLSGQQSEVPGSIPNSWKWTVEHIVYKALRSHILPPKHFTEDGNILQLANLPDLYKVFERC

SEQ ID NO: 293 - protein, 756 aa, Homo sapiens
MSFVAGVIRRLDETVVNRIAAGEVIQRPANAIKEMIENCLDAKSISIQVIVKEGGLKLIQIQDNGTGIRKEDLDIVCERFTTSKLQSFEDLASISTYGFRGEALASISHVAHVTITTKTADGKCAYRASYSDGKLKAPPKPCAGNQGTQITVEDLFYNIATRRKALKNPSEEYGKILEVVGRYSVHNAGISFSVKKQGETVADVRTLPNASTVDNIRSVFGNAVSRELIEIGCEDKTLAFKMNGYISNANYSVKKCIFLLFINHRLVESTSLRKAIETVYAAYLPKNTHPFLYLSLEISPQNVDVNVHPTKHEVHFLHEESILERVQQHIESKLLGSNSSRMYFTQTLLPGLAGPSGEMVKSTTSLTSSSTSGSSDKVYAHQMVRTDSREQKLDAFLQPLSKPLSSQPQAIVTEDKTDISSGRARQQDEEMLELPAPAEVAAKNQSLEGDTTKGTSEMSEKRGPTSSNPRKRHREDSDVEMVEDDSRKEMTAACTPRRRIINLTSVLSLQEEINEQGHEVLREMLHNHSFVGCVNPQWALAQHQTKLYLLNTTKLSEELFYQILIYDFANFGVLRLSEPAPLFDLAMLALDSPESGWTEEDGPKEGLAEYIVEFLKKKAEMLADYFSLEIDEEGNLIGLPLLIDNYVPPLEGLPIFILRLATEVNWDEEKECFESLSKECAMFYSIRKQYISEESTLSGQQSEVPGSIPNSWKWTVEHIVYKALRSHILPPKHFTEDGNILQLANLPDLYKVFERC

SEQ ID NO: 294 - protein, 756 aa, Homo sapiens
MSFVAGVIRRLDETVVNRIAAGEVIQRPANAIKEMIENCLDAKSTTIQVIVKEGGLKLIQIQDNGTGIRKEDLDIVCERFTTSKLQSFEDLASISTYGFRGEALASISHVAHVTITTKTADGKCAYRASYSDGKLKAPPKPCAGNQGTQITVEDLFYNIATRRKALKNPSEEYGKILEVVGRYSVHNAGISFSVKKQGETVADVRTLPNASTVDNIRSVFGNAVSRELIEIGCEDKTLAFKMNGYISNANYSVKKCIFLLFINHRLVESTSLRKAIETVYAAYLPKNTHPFLYLSLEISPQNVDVNVHPTKHEVHFLHEESILERVQQHIESKLLGSNSSRMYFTQTLLPGLAGPSGEMVKSTTSLTSSSTSGSSDKVYAHQMVRTDSREQKLDAFLQPLSKPLSSQPQAIVTEDKTDISSGRARQQDEEMLELPAPAEVAAKNQSLEGDTTKGTSEMSEKRGPTSSNPRKRHREDSDVEMVEDDSRKEMTAACTPRRRIINLTSVLSLQEEINEQGHEVLREMLHNHSFVGCVNPQWALAQHQTKLYLLNTTKLSEELFYQILIYDFANFGVLRLSEPAPLFDLAMLALDSPESGWTEEDGPKEGLAEYIVEFLKKKAEMLADYFSLEIDEEGNLIGLPLLIDNYVPPLEGLPIFILRLATEVNWDEEKECFESLSKECAMFYSIRKQYISEESTLSGQQSEVPGSIPNSWKWTVEHIVYKALRSHILPPKHFTEDGNILQLANLPDLYKVFERC

SEQ ID NO: 295 - protein, 756 aa, Homo sapiens
MSFVAGVIRRLDETVVNRIAAGEVIQRPANAIKEMIENCLDAKSTSSQVIVKEGGLKLIQIQDNGTGIRKEDLDIVCERFTTSKLQSFEDLASISTYGFRGEALASISHVAHVTITTKTADGKCAYRASYSDGKLKAPPKPCAGNQGTQITVEDLFYNIATRRKALKNPSEEYGKILEVVGRYSVHNAGISFSVKKQGETVADVRTLPNASTVDNIRSVFGNAVSRELIEIGCEDKTLAFKMNGYISNANYSVKKCIFLLFINHRLVESTSLRKAIETVYAAYLPKNTHPFLYLSLEISPQNVDVNVHPTKHEVHFLHEESILERVQQHIESKLLGSNSSRMYFTQTLLPGLAGPSGEMVKSTTSLTSSSTSGSSDKVYAHQMVRTDSREQKLDAFLQPLSKPLSSQPQAIVTEDKTDISSGRARQQDEEMLELPAPAEVAAKNQSLEGDTTKGTSEMSEKRGPTSSNPRKRHREDSDVEMVEDDSRKEMTAACTPRRRIINLTSVLSLQEEINEQGHEVLREMLHNHSFVGCVNPQWALAQHQTKLYLLNTTKLSEELFYQILIYDFANFGVLRLSEPAPLFDLAMLALDSPESGWTEEDGPKEGLAEYIVEFLKKKAEMLADYFSLEIDEEGNLIGLPLLIDNYVPPLEGLPIFILRLATEVNWDEEKECFESLSKECAMFYSIRKQYISEESTLSGQQSEVPGSIPNSWKWTVEHIVYKALRSHILPPKHFTEDGNILQLANLPDLYKVFERC

SEQ ID NO: 296 - protein, 756 aa, Homo sapiens
MSFVAGVIRRLDETVVNRIAAGEVIQRPANAIKEMIENCLDAKSTSTQVIVKEGGLKLIQIQDNGTGIRKEDLDIVCERFTTSKLQSFEDLASISTYGFRGEALASISHVAHVTITTKTADGKCAYRASYSDGKLKAPPKPCAGNQGTQITVEDLFYNIATRRKALKNPSEEYGKILEVVGRYSVHNAGISFSVKKQGETVADVRTLPNASTVDNIRSVFGNAVSRELIEIGCEDKTLAFKMNGYISNANYSVKKCIFLLFINHRLVESTSLRKAIETVYAAYLPKNTHPFLYLSLEISPQNVDVNVHPTKHEVHFLHEESILERVQQHIESKLLGSNSSRMYFTQTLLPGLAGPSGEMVKSTTSLTSSSTSGSSDKVYAHQMVRTDSREQKLDAFLQPLSKPLSSQPQAIVTEDKTDISSGRARQQDEEMLELPAPAEVAAKNQSLEGDTTKGTSEMSEKRGPTSSNPRKRHREDSDVEMVEDDSRKEMTAACTPRRRIINLTSVLSLQEEINEQGHEVLREMLHNHSFVGCVNPQWALAQHQTKLYLLNTTKLSEELFYQILIYDFANFGVLRLSEPAPLFDLAMLALDSPESGWTEEDGPKEGLAEYIVEFLKKKAEMLADYFSLEIDEEGNLIGLPLLIDNYVPPLEGLPIFILRLATEVNWDEEKECFESLSKECAMFYSIRKQYISEESTLSGQQSEVPGSIPNSWKWTVEHIVYKALRSHILPPKHFTEDGNILQLANLPDLYKVFERC

SEQ ID NO: 297 - protein, 756 aa, Homo sapiens
MSFVAGVIRRLDETVVNRIAAGEVIQRPANAIKEMIENCLDAKSTSIGVIVKEGGLKLIQIQDNGTGIRKEDLDIVCERFTTSKLQSFEDLASISTYGFRGEALASISHVAHVTITTKTADGKCAYRASYSDGKLKAPPKPCAGNQGTQITVEDLFYNIATRRKALKNPSEEYGKILEVVGRYSVHNAGISFSVKKQGETVADVRTLPNASTVDNIRSVFGNAVSRELIEIGCEDKTLAFKMNGYISNANYSVKKCIFLLFINHRLVESTSLRKAIETVYAAYLPKNTHPFLYLSLEISPQNVDVNVHPTKHEVHFLHEESILERVQQHIESKLLGSNSSRMYFTQTLLPGLAGPSGEMVKSTTSLTSSSTSGSSDKVYAHQMVRTDSREQKLDAFLQPLSKPLSSQPQAIVTEDKTDISSGRARQQDEEMLELPAPAEVAAKNQSLEGDTTKGTSEMSEKRGPTSSNPRKRHREDSDVEMVEDDSRKEMTAACTPRRRIINLTSVLSLQEEINEQGHEVLREMLHNHSFVGCVNPQWALAQHQTKLYLLNTTKLSEELFYQILIYDFANFGVLRLSEPAPLFDLAMLALDSPESGWTEEDGPKEGLAEYIVEFLKKKAEMLADYFSLEIDEEGNLIGLPLLIDNYVPPLEGLPIFILRLATEVNWDEEKECFESLSKECAMFYSIRKQYISEESTLSGQQSEVPGSIPNSWKWTVEHIVYKALRSHILPPKHFTEDGNILQLANLPDLYKVFERC

SEQ ID NO: 298 - protein, 756 aa, Homo sapiens
MSFVAGVIRRLDETVVNRIAAGEVIQRPANAIKEMIENCLDAKSTSIYVIVKEGGLKLIQIQDNGTGIRKEDLDIVCERFTTSKLQSFEDLASISTYGFRGEALASISHVAHVTITTKTADGKCAYRASYSDGKLKAPPKPCAGNQGTQITVEDLFYNIATRRKALKNPSEEYGKILEVVGRYSVHNAGISFSVKKQGETVADVRTLPNASTVDNIRSVFGNAVSRELIEIGCEDKTLAFKMNGYISNANYSVKKCIFLLFINHRLVESTSLRKAIETVYAAYLPKNTHPFLYLSLEISPQNVDVNVHPTKHEVHFLHEESILERVQQHIESKLLGSNSSRMYFTQTLLPGLAGPSGEMVKSTTSLTSSSTSGSSDKVYAHQMVRTDSREQKLDAFLQPLSKPLSSQPQAIVTEDKTDISSGRARQQDEEMLELPAPAEVAAKNQSLEGDTTKGTSEMSEKRGPTSSNPRKRHREDSDVEMVEDDSRKEMTAACTPRRRIINLTSVLSLQEEINEQGHEVLREMLHNHSFVGCVNPQWALAQHQTKLYLLNTTKLSEELFYQILIYDFANFGVLRLSEPAPLFDLAMLALDSPESGWTEEDGPKEGLAEYIVEFLKKKAEMLADYFSLEIDEEGNLIGLPLLIDNYVPPLEGLPIFILRLATEVNWDEEKECFESLSKECAMFYSIRKQYISEESTLSGQQSEVPGSIPNSWKWTVEHIVYKALRSHILPPKHFTEDGNILQLANLPDLYKVFERC

SEQ ID NO: 299 - protein, 756 aa, Homo sapiens
MSFVAGVIRRLDETVVNRIAAGEVIQRPANAIKEMIENCLDAKSTSIQEIVKEGGLKLIQIQDNGTGIRKEDLDIVCERFTTSKLQSFEDLASISTYGFRGEALASISHVAHVTITTKTADGKCAYRASYSDGKLKAPPKPCAGNQGTQITVEDLFYNIATRRKALKNPSEEYGKILEVVGRYSVHNAGISFSVKKQGETVADVRTLPNASTVDNIRSVFGNAVSRELIEIGCEDKTLAFKMNGYISNANYSVKKCIFLLFINHRLVESTSLRKAIETVYAAYLPKNTHPFLYLSLEISPQNVDVNVHPTKHEVHFLHEESILERVQQHIESKLLGSNSSRMYFTQTLLPGLAGPSGEMVKSTTSLTSSSTSGSSDKVYAHQMVRTDSREQKLDAFLQPLSKPLSSQPQAIVTEDKTDISSGRARQQDEEMLELPAPAEVAAKNQSLEGDTTKGTSEMSEKRGPTSSNPRKRHREDSDVEMVEDDSRKEMTAACTPRRRIINLTSVLSLQEEINEQGHEVLREMLHNHSFVGCVNPQWALAQHQTKLYLLNTTKLSEELFYQILIYDFANFGVLRLSEPAPLFDLAMLALDSPESGWTEEDGPKEGLAEYIVEFLKKKAEMLADYFSLEIDEEGNLIGLPLLIDNYVPPLEGLPIFILRLATEVNWDEEKECFESLSKECAMFYSIRKQYISEESTLSGQQSEVPGSIPNSWKWTVEHIVYKALRSHILPPKHFTEDGNILQLANLPDLYKVFERC

SEQ ID NO: 300 - protein, 756 aa, Homo sapiens
MSFVAGVIRRLDETVVNRIAAGEVIQRPANAIKEMIENCLDAKSTSIQMIVKEGGLKLIQIQDNGTGIRKEDLDIVCERFTTSKLQSFEDLASISTYGFRGEALASISHVAHVTITTKTADGKCAYRASYSDGKLKAPPKPCAGNQGTQITVEDLFYNIATRRKALKNPSEEYGKILEVVGRYSVHNAGISFSVKKQGETVADVRTLPNASTVDNIRSVFGNAVSRELIEIGCEDKTLAFKMNGYISNANYSVKKCIFLLFINHRLVESTSLRKAIETVYAAYLPKNTHPFLYLSLEISPQNVDVNVHPTKHEVHFLHEESILERVQQHIESKLLGSNSSRMYFTQTLLPGLAGPSGEMVKSTTSLTSSSTSGSSDKVYAHQMVRTDSREQKLDAFLQPLSKPLSSQPQAIVTEDKTDISSGRARQQDEEMLELPAPAEVAAKNQSLEGDTTKGTSEMSEKRGPTSSNPRKRHREDSDVEMVEDDSRKEMTAACTPRRRIINLTSVLSLQEEINEQGHEVLREMLHNHSFVGCVNPQWALAQHQTKLYLLNTTKLSEELFYQILIYDFANFGVLRLSEPAPLFDLAMLALDSPESGWTEEDGPKEGLAEYIVEFLKKKAEMLADYFSLEIDEEGNLIGLPLLIDNYVPPLEGLPIFILRLATEVNWDEEKECFESLSKECAMFYSIRKQYISEESTLSGQQSEVPGSIPNSWKWTVEHIVYKALRSHILPPKHFTEDGNILQLANLPDLYKVFERC

SEQ ID NO: 301 - protein, 756 aa, Homo sapiens
MSFVAGVIRRLDETVVNRIAAGEVIQRPANAIKEMIENCLDAKSTSIQNIVKEGGLKLIQIQDNGTGIRKEDLDIVCERFTTSKLQSFEDLASISTYGFRGEALASISHVAHVTITTKTADGKCAYRASYSDGKLKAPPKPCAGNQGTQITVEDLFYNIATRRKALKNPSEEYGKILEVVGRYSVHNAGISFSVKKQGETVADVRTLPNASTVDNIRSVFGNAVSRELIEIGCEDKTLAFKMNGYISNANYSVKKCIFLLFINHRLVESTSLRKAIETVYAAYLPKNTHPFLYLSLEISPQNVDVNVHPTKHEVHFLHEESILERVQQHIESKLLGSNSSRMYFTQTLLPGLAGPSGEMVKSTTSLTSSSTSGSSDKVYAHQMVRTDSREQKLDAFLQPLSKPLSSQPQAIVTEDKTDISSGRARQQDEEMLELPAPAEVAAKNQSLEGDTTKGTSEMSEKRGPTSSNPRKRHREDSDVEMVEDDSRKEMTAACTPRRRIINLTSVLSLQEEINEQGHEVLREMLHNHSFVGCVNPQWALAQHQTKLYLLNTTKLSEELFYQILIYDFANFGVLRLSEPAPLFDLAMLALDSPESGWTEEDGPKEGLAEYIVEFLKKKAEMLADYFSLEIDEEGNLIGLPLLIDNYVPPLEGLPIFILRLATEVNWDEEKECFESLSKECAMFYSIRKQYISEESTLSGQQSEVPGSIPNSWKWTVEHIVYKALRSHILPPKHFTEDGNILQLANLPDLYKVFERC

SEQ ID NO: 302 - protein, 756 aa, Homo sapiens
MSFVAGVIRRLDETVVNRIAAGEVIQRPANAIKEMIENCLDAKSTSIQVIAKEGGLKLIQIQDNGTGIRKEDLDIVCERFTTSKLQSFEDLASISTYGFRGEALASISHVAHVTITTKTADGKCAYRASYSDGKLKAPPKPCAGNQGTQITVEDLFYNIATRRKALKNPSEEYGKILEVVGRYSVHNAGISFSVKKQGETVADVRTLPNASTVDNIRSVFGNAVSRELIEIGCEDKTLAFKMNGYISNANYSVKKCIFLLFINHRLVESTSLRKAIETVYAAYLPKNTHPFLYLSLEISPQNVDVNVHPTKHEVHFLHEESILERVQQHIESKLLGSNSSRMYFTQTLLPGLAGPSGEMVKSTTSLTSSSTSGSSDKVYAHQMVRTDSREQKLDAFLQPLSKPLSSQPQAIVTEDKTDISSGRARQQDEEMLELPAPAEVAAKNQSLEGDTTKGTSEMSEKRGPTSSNPRKRHREDSDVEMVEDDSRKEMTAACTPRRRIINLTSVLSLQEEINEQGHEVLREMLHNHSFVGCVNPQWALAQHQTKLYLLNTTKLSEELFYQILIYDFANFGVLRLSEPAPLFDLAMLALDSPESGWTEEDGPKEGLAEYIVEFLKKKAEMLADYFSLEIDEEGNLIGLPLLIDNYVPPLEGLPIFILRLATEVNWDEEKECFESLSKECAMFYSIRKQYISEESTLSGQQSEVPGSIPNSWKWTVEHIVYKALRSHILPPKHFTEDGNILQLANLPDLYKVFERC

SEQ ID NO: 303 - protein, 756 aa, Homo sapiens
MSFVAGVIRRLDETVVNRIAAGEVIQRPANAIKEMIENCLDAKSTSIQVIDKEGGLKLIQIQDNGTGIRKEDLDIVCERFTTSKLQSFEDLASISTYGFRGEALASISHVAHVTITTKTADGKCAYRASYSDGKLKAPPKPCAGNQGTQITVEDLFYNIATRRKALKNPSEEYGKILEVVGRYSVHNAGISFSVKKQGETVADVRTLPNASTVDNIRSVFGNAVSRELIEIGCEDKTLAFKMNGYISNANYSVKKCIFLLFINHRLVESTSLRKAIETVYAAYLPKNTHPFLYLSLEISPQNVDVNVHPTKHEVHFLHEESILERVQQHIESKLLGSNSSRMYFTQTLLPGLAGPSGEMVKSTTSLTSSSTSGSSDKVYAHQMVRTDSREQKLDAFLQPLSKPLSSQPQAIVTEDKTDISSGRARQQDEEMLELPAPAEVAAKNQSLEGDTTKGTSEMSEKRGPTSSNPRKRHREDSDVEMVEDDSRKEMTAACTPRRRIINLTSVLSLQEEINEQGHEVLREMLHNHSFVGCVNPQWALAQHQTKLYLLNTTKLSEELFYQILIYDFANFGVLRLSEPAPLFDLAMLALDSPESGWTEEDGPKEGLAEYIVEFLKKKAEMLADYFSLEIDEEGNLIGLPLLIDNYVPPLEGLPIFILRLATEVNWDEEKECFESLSKECAMFYSIRKQYISEESTLSGQQSEVPGSIPNSWKWTVEHIVYKALRSHILPPKHFTEDGNILQLANLPDLYKVFERC

SEQ ID NO: 304 - protein, 756 aa, Homo sapiens
MSFVAGVIRRLDETVVNRIAAGEVIQRPANAIKEMIENCLDAKSTSIQVIVKEGSLKLIQIQDNGTGIRKEDLDIVCERFTTSKLQSFEDLASISTYGFRGEALASISHVAHVTITTKTADGKCAYRASYSDGKLKAPPKPCAGNQGTQITVEDLFYNIATRRKALKNPSEEYGKILEVVGRYSVHNAGISFSVKKQGETVADVRTLPNASTVDNIRSVFGNAVSRELIEIGCEDKTLAFKMNGYISNANYSVKKCIFLLFINHRLVESTSLRKAIETVYAAYLPKNTHPFLYLSLEISPQNVDVNVHPTKHEVHFLHEESILERVQQHIESKLLGSNSSRMYFTQTLLPGLAGPSGEMVKSTTSLTSSSTSGSSDKVYAHQMVRTDSREQKLDAFLQPLSKPLSSQPQAIVTEDKTDISSGRARQQDEEMLELPAPAEVAAKNQSLEGDTTKGTSEMSEKRGPTSSNPRKRHREDSDVEMVEDDSRKEMTAACTPRRRIINLTSVLSLQEEINEQGHEVLREMLHNHSFVGCVNPQWALAQHQTKLYLLNTTKLSEELFYQILIYDFANFGVLRLSEPAPLFDLAMLALDSPESGWTEEDGPKEGLAEYIVEFLKKKAEMLADYFSLEIDEEGNLIGLPLLIDNYVPPLEGLPIFILRLATEVNWDEEKECFESLSKECAMFYSIRKQYISEESTLSGQQSEVPGSIPNSWKWTVEHIVYKALRSHILPPKHFTEDGNILQLANLPDLYKVFERC

SEQ ID NO: 305 - protein, 756 aa, Homo sapiens
MSFVAGVIRRLDETVVNRIAAGEVIQRPANAIKEMIENCLDAKSTSIQVIVKEGGMKLIQIQDNGTGIRKEDLDIVCERFTTSKLQSFEDLASISTYGFRGEALASISHVAHVTITTKTADGKCAYRASYSDGKLKAPPKPCAGNQGTQITVEDLFYNIATRRKALKNPSEEYGKILEVVGRYSVHNAGISFSVKKQGETVADVRTLPNASTVDNIRSVFGNAVSRELIEIGCEDKTLAFKMNGYISNANYSVKKCIFLLFINHRLVESTSLRKAIETVYAAYLPKNTHPFLYLSLEISPQNVDVNVHPTKHEVHFLHEESILERVQQHIESKLLGSNSSRMYFTQTLLPGLAGPSGEMVKSTTSLTSSSTSGSSDKVYAHQMVRTDSREQKLDAFLQPLSKPLSSQPQAIVTEDKTDISSGRARQQDEEMLELPAPAEVAAKNQSLEGDTTKGTSEMSEKRGPTSSNPRKRHREDSDVEMVEDDSRKEMTAACTPRRRIINLTSVLSLQEEINEQGHEVLREMLHNHSFVGCVNPQWALAQHQTKLYLLNTTKLSEELFYQILIYDFANFGVLRLSEPAPLFDLAMLALDSPESGWTEEDGPKEGLAEYIVEFLKKKAEMLADYFSLEIDEEGNLIGLPLLIDNYVPPLEGLPIFILRLATEVNWDEEKECFESLSKECAMFYSIRKQYISEESTLSGQQSEVPGSIPNSWKWTVEHIVYKALRSHILPPKHFTEDGNILQLANLPDLYKVFERC

SEQ ID NO: 306 - protein, 756 aa, Homo sapiens
MSFVAGVIRRLDETVVNRIAAGEVIQRPANAIKEMIENCLDAKSTSIQVIVKEGGPKLIQIQDNGTGIRKEDLDIVCERFTTSKLQSFEDLASISTYGFRGEALASISHVAHVTITTKTADGKCAYRASYSDGKLKAPPKPCAGNQGTQITVEDLFYNIATRRKALKNPSEEYGKILEVVGRYSVHNAGISFSVKKQGETVADVRTLPNASTVDNIRSVFGNAVSRELIEIGCEDKTLAFKMNGYISNANYSVKKCIFLLFINHRLVESTSLRKAIETVYAAYLPKNTHPFLYLSLEISPQNVDVNVHPTKHEVHFLHEESILERVQQHIESKLLGSNSSRMYFTQTLLPGLAGPSGEMVKSTTSLTSSSTSGSSDKVYAHQMVRTDSREQKLDAFLQPLSKPLSSQPQAIVTEDKTDISSGRARQQDEEMLELPAPAEVAAKNQSLEGDTTKGTSEMSEKRGPTSSNPRKRHREDSDVEMVEDDSRKEMTAACTPRRRIINLTSVLSLQEEINEQGHEVLREMLHNHSFVGCVNPQWALAQHQTKLYLLNTTKLSEELFYQILIYDFANFGVLRLSEPAPLFDLAMLALDSPESGWTEEDGPKEGLAEYIVEFLKKKAEMLADYFSLEIDEEGNLIGLPLLIDNYVPPLEGLPIFILRLATEVNWDEEKECFESLSKECAMFYSIRKQYISEESTLSGQQSEVPGSIPNSWKWTVEHIVYKALRSHILPPKHFTEDGNILQLANLPDLYKVFERC

SEQ ID NO: 307 - protein, 756 aa, Homo sapiens
MSFVAGVIRRLDETVVNRIAAGEVIQRPANAIKEMIENCLDAKSTSIQVIVKEGGLNLIQIQDNGTGIRKEDLDIVCERFTTSKLQSFEDLASISTYGFRGEALASISHVAHVTITTKTADGKCAYRASYSDGKLKAPPKPCAGNQGTQITVEDLFYNIATRRKALKNPSEEYGKILEVVGRYSVHNAGISFSVKKQGETVADVRTLPNASTVDNIRSVFGNAVSRELIEIGCEDKTLAFKMNGYISNANYSVKKCIFLLFINHRLVESTSLRKAIETVYAAYLPKNTHPFLYLSLEISPQNVDVNVHPTKHEVHFLHEESILERVQQHIESKLLGSNSSRMYFTQTLLPGLAGPSGEMVKSTTSLTSSSTSGSSDKVYAHQMVRTDSREQKLDAFLQPLSKPLSSQPQAIVTEDKTDISSGRARQQDEEMLELPAPAEVAAKNQSLEGDTTKGTSEMSEKRGPTSSNPRKRHREDSDVEMVEDDSRKEMTAACTPRRRIINLTSVLSLQEEINEQGHEVLREMLHNHSFVGCVNPQWALAQHQTKLYLLNTTKLSEELFYQILIYDFANFGVLRLSEPAPLFDLAMLALDSPESGWTEEDGPKEGLAEYIVEFLKKKAEMLADYFSLEIDEEGNLIGLPLLIDNYVPPLEGLPIFILRLATEVNWDEEKECFESLSKECAMFYSIRKQYISEESTLSGQQSEVPGSIPNSWKWTVEHIVYKALRSHILPPKHFTEDGNILQLANLPDLYKVFERC

SEQ ID NO: 308 - protein, 756 aa, Homo sapiens
MSFVAGVIRRLDETVVNRIAAGEVIQRPANAIKEMIENCLDAKSTSIQVIVKEGGLKLFQIQDNGTGIRKEDLDIVCERFTTSKLQSFEDLASISTYGFRGEALASISHVAHVTITTKTADGKCAYRASYSDGKLKAPPKPCAGNQGTQITVEDLFYNIATRRKALKNPSEEYGKILEVVGRYSVHNAGISFSVKKQGETVADVRTLPNASTVDNIRSVFGNAVSRELIEIGCEDKTLAFKMNGYISNANYSVKKCIFLLFINHRLVESTSLRKAIETVYAAYLPKNTHPFLYLSLEISPQNVDVNVHPTKHEVHFLHEESILERVQQHIESKLLGSNSSRMYFTQTLLPGLAGPSGEMVKSTTSLTSSSTSGSSDKVYAHQMVRTDSREQKLDAFLQPLSKPLSSQPQAIVTEDKTDISSGRARQQDEEMLELPAPAEVAAKNQSLEGDTTKGTSEMSEKRGPTSSNPRKRHREDSDVEMVEDDSRKEMTAACTPRRRIINLTSVLSLQEEINEQGHEVLREMLHNHSFVGCVNPQWALAQHQTKLYLLNTTKLSEELFYQILIYDFANFGVLRLSEPAPLFDLAMLALDSPESGWTEEDGPKEGLAEYIVEFLKKKAEMLADYFSLEIDEEGNLIGLPLLIDNYVPPLEGLPIFILRLATEVNWDEEKECFESLSKECAMFYSIRKQYISEESTLSGQQSEVPGSIPNSWKWTVEHIVYKALRSHILPPKHFTEDGNILQLANLPDLYKVFERC

SEQ ID NO: 309 - protein, 756 aa, Homo sapiens
MSFVAGVIRRLDETVVNRIAAGEVIQRPANAIKEMIENCLDAKSTSIQVIVKEGGLKLHQIQDNGTGIRKEDLDIVCERFTTSKLQSFEDLASISTYGFRGEALASISHVAHVTITTKTADGKCAYRASYSDGKLKAPPKPCAGNQGTQITVEDLFYNIATRRKALKNPSEEYGKILEVVGRYSVHNAGISFSVKKQGETVADVRTLPNASTVDNIRSVFGNAVSRELIEIGCEDKTLAFKMNGYISNANYSVKKCIFLLFINHRLVESTSLRKAIETVYAAYLPKNTHPFLYLSLEISPQNVDVNVHPTKHEVHFLHEESILERVQQHIESKLLGSNSSRMYFTQTLLPGLAGPSGEMVKSTTSLTSSSTSGSSDKVYAHQMVRTDSREQKLDAFLQPLSKPLSSQPQAIVTEDKTDISSGRARQQDEEMLELPAPAEVAAKNQSLEGDTTKGTSEMSEKRGPTSSNPRKRHREDSDVEMVEDDSRKEMTAACTPRRRIINLTSVLSLQEEINEQGHEVLREMLHNHSFVGCVNPQWALAQHQTKLYLLNTTKLSEELFYQILIYDFANFGVLRLSEPAPLFDLAMLALDSPESGWTEEDGPKEGLAEYIVEFLKKKAEMLADYFSLEIDEEGNLIGLPLLIDNYVPPLEGLPIFILRLATEVNWDEEKECFESLSKECAMFYSIRKQYISEESTLSGQQSEVPGSIPNSWKWTVEHIVYKALRSHILPPKHFTEDGNILQLANLPDLYKVFERC

SEQ ID NO: 310 - protein, 756 aa, Homo sapiens
MSFVAGVIRRLDETVVNRIAAGEVIQRPANAIKEMIENCLDAKSTSIQVIVKEGGLKLNQIQDNGTGIRKEDLDIVCERFTTSKLQSFEDLASISTYGFRGEALASISHVAHVTITTKTADGKCAYRASYSDGKLKAPPKPCAGNQGTQITVEDLFYNIATRRKALKNPSEEYGKILEVVGRYSVHNAGISFSVKKQGETVADVRTLPNASTVDNIRSVFGNAVSRELIEIGCEDKTLAFKMNGYISNANYSVKKCIFLLFINHRLVESTSLRKAIETVYAAYLPKNTHPFLYLSLEISPQNVDVNVHPTKHEVHFLHEESILERVQQHIESKLLGSNSSRMYFTQTLLPGLAGPSGEMVKSTTSLTSSSTSGSSDKVYAHQMVRTDSREQKLDAFLQPLSKPLSSQPQAIVTEDKTDISSGRARQQDEEMLELPAPAEVAAKNQSLEGDTTKGTSEMSEKRGPTSSNPRKRHREDSDVEMVEDDSRKEMTAACTPRRRIINLTSVLSLQEEINEQGHEVLREMLHNHSFVGCVNPQWALAQHQTKLYLLNTTKLSEELFYQILIYDFANFGVLRLSEPAPLFDLAMLALDSPESGWTEEDGPKEGLAEYIVEFLKKKAEMLADYFSLEIDEEGNLIGLPLLIDNYVPPLEGLPIFILRLATEVNWDEEKECFESLSKECAMFYSIRKQYISEESTLSGQQSEVPGSIPNSWKWTVEHIVYKALRSHILPPKHFTEDGNILQLANLPDLYKVFERC

SEQ ID NO: 311 - protein, 756 aa, Homo sapiens
MSFVAGVIRRLDETVVNRIAAGEVIQRPANAIKEMIENCLDAKSTSIQVIVKEGGLKLTQIQDNGTGIRKEDLDIVCERFTTSKLQSFEDLASISTYGFRGEALASISHVAHVTITTKTADGKCAYRASYSDGKLKAPPKPCAGNQGTQITVEDLFYNIATRRKALKNPSEEYGKILEVVGRYSVHNAGISFSVKKQGETVADVRTLPNASTVDNIRSVFGNAVSRELIEIGCEDKTLAFKMNGYISNANYSVKKCIFLLFINHRLVESTSLRKAIETVYAAYLPKNTHPFLYLSLEISPQNVDVNVHPTKHEVHFLHEESILERVQQHIESKLLGSNSSRMYFTQTLLPGLAGPSGEMVKSTTSLTSSSTSGSSDKVYAHQMVRTDSREQKLDAFLQPLSKPLSSQPQAIVTEDKTDISSGRARQQDEEMLELPAPAEVAAKNQSLEGDTTKGTSEMSEKRGPTSSNPRKRHREDSDVEMVEDDSRKEMTAACTPRRRIINLTSVLSLQEEINEQGHEVLREMLHNHSFVGCVNPQWALAQHQTKLYLLNTTKLSEELFYQILIYDFANFGVLRLSEPAPLFDLAMLALDSPESGWTEEDGPKEGLAEYIVEFLKKKAEMLADYFSLEIDEEGNLIGLPLLIDNYVPPLEGLPIFILRLATEVNWDEEKECFESLSKECAMFYSIRKQYISEESTLSGQQSEVPGSIPNSWKWTVEHIVYKALRSHILPPKHFTEDGNILQLANLPDLYKVFERC

SEQ ID NO: 312 - protein, 756 aa, Homo sapiens
MSFVAGVIRRLDETVVNRIAAGEVIQRPANAIKEMIENCLDAKSTSIQVIVKEGGLKLIQNQDNGTGIRKEDLDIVCERFTTSKLQSFEDLASISTYGFRGEALASISHVAHVTITTKTADGKCAYRASYSDGKLKAPPKPCAGNQGTQITVEDLFYNIATRRKALKNPSEEYGKILEVVGRYSVHNAGISFSVKKQGETVADVRTLPNASTVDNIRSVFGNAVSRELIEIGCEDKTLAFKMNGYISNANYSVKKCIFLLFINHRLVESTSLRKAIETVYAAYLPKNTHPFLYLSLEISPQNVDVNVHPTKHEVHFLHEESILERVQQHIESKLLGSNSSRMYFTQTLLPGLAGPSGEMVKSTTSLTSSSTSGSSDKVYAHQMVRTDSREQKLDAFLQPLSKPLSSQPQAIVTEDKTDISSGRARQQDEEMLELPAPAEVAAKNQSLEGDTTKGTSEMSEKRGPTSSNPRKRHREDSDVEMVEDDSRKEMTAACTPRRRIINLTSVLSLQEEINEQGHEVLREMLHNHSFVGCVNPQWALAQHQTKLYLLNTTKLSEELFYQILIYDFANFGVLRLSEPAPLFDLAMLALDSPESGWTEEDGPKEGLAEYIVEFLKKKAEMLADYFSLEIDEEGNLIGLPLLIDNYVPPLEGLPIFILRLATEVNWDEEKECFESLSKECAMFYSIRKQYISEESTLSGQQSEVPGSIPNSWKWTVEHIVYKALRSHILPPKHFTEDGNILQLANLPDLYKVFERC

SEQ ID NO: 313 - protein, 756 aa, Homo sapiens
MSFVAGVIRRLDETVVNRIAAGEVIQRPANAIKEMIENCLDAKSTSIQVIVKEGGLKLIQIQGNGTGIRKEDLDIVCERFTTSKLQSFEDLASISTYGFRGEALASISHVAHVTITTKTADGKCAYRASYSDGKLKAPPKPCAGNQGTQITVEDLFYNIATRRKALKNPSEEYGKILEVVGRYSVHNAGISFSVKKQGETVADVRTLPNASTVDNIRSVFGNAVSRELIEIGCEDKTLAFKMNGYISNANYSVKKCIFLLFINHRLVESTSLRKAIETVYAAYLPKNTHPFLYLSLEISPQNVDVNVHPTKHEVHFLHEESILERVQQHIESKLLGSNSSRMYFTQTLLPGLAGPSGEMVKSTTSLTSSSTSGSSDKVYAHQMVRTDSREQKLDAFLQPLSKPLSSQPQAIVTEDKTDISSGRARQQDEEMLELPAPAEVAAKNQSLEGDTTKGTSEMSEKRGPTSSNPRKRHREDSDVEMVEDDSRKEMTAACTPRRRIINLTSVLSLQEEINEQGHEVLREMLHNHSFVGCVNPQWALAQHQTKLYLLNTTKLSEELFYQILIYDFANFGVLRLSEPAPLFDLAMLALDSPESGWTEEDGPKEGLAEYIVEFLKKKAEMLADYFSLEIDEEGNLIGLPLLIDNYVPPLEGLPIFILRLATEVNWDEEKECFESLSKECAMFYSIRKQYISEESTLSGQQSEVPGSIPNSWKWTVEHIVYKALRSHILPPKHFTEDGNILQLANLPDLYKVFERC

SEQ ID NO: 314 - protein, 756 aa, Homo sapiens
MSFVAGVIRRLDETVVNRIAAGEVIQRPANAIKEMIENCLDAKSTSIQVIVKEGGLKLIQIQYNGTGIRKEDLDIVCERFTTSKLQSFEDLASISTYGFRGEALASISHVAHVTITTKTADGKCAYRASYSDGKLKAPPKPCAGNQGTQITVEDLFYNIATRRKALKNPSEEYGKILEVVGRYSVHNAGISFSVKKQGETVADVRTLPNASTVDNIRSVFGNAVSRELIEIGCEDKTLAFKMNGYISNANYSVKKCIFLLFINHRLVESTSLRKAIETVYAAYLPKNTHPFLYLSLEISPQNVDVNVHPTKHEVHFLHEESILERVQQHIESKLLGSNSSRMYFTQTLLPGLAGPSGEMVKSTTSLTSSSTSGSSDKVYAHQMVRTDSREQKLDAFLQPLSKPLSSQPQAIVTEDKTDISSGRARQQDEEMLELPAPAEVAAKNQSLEGDTTKGTSEMSEKRGPTSSNPRKRHREDSDVEMVEDDSRKEMTAACTPRRRIINLTSVLSLQEEINEQGHEVLREMLHNHSFVGCVNPQWALAQHQTKLYLLNTTKLSEELFYQILIYDFANFGVLRLSEPAPLFDLAMLALDSPESGWTEEDGPKEGLAEYIVEFLKKKAEMLADYFSLEIDEEGNLIGLPLLIDNYVPPLEGLPIFILRLATEVNWDEEKECFESLSKECAMFYSIRKQYISEESTLSGQQSEVPGSIPNSWKWTVEHIVYKALRSHILPPKHFTEDGNILQLANLPDLYKVFERC

SEQ ID NO: 315 - protein, 756 aa, Homo sapiens
MSFVAGVIRRLDETVVNRIAAGEVIQRPANAIKEMIENCLDAKSTSIQVIVKEGGLKLIQIQDIGTGIRKEDLDIVCERFTTSKLQSFEDLASISTYGFRGEALASISHVAHVTITTKTADGKCAYRASYSDGKLKAPPKPCAGNQGTQITVEDLFYNIATRRKALKNPSEEYGKILEVVGRYSVHNAGISFSVKKQGETVADVRTLPNASTVDNIRSVFGNAVSRELIEIGCEDKTLAFKMNGYISNANYSVKKCIFLLFINHRLVESTSLRKAIETVYAAYLPKNTHPFLYLSLEISPQNVDVNVHPTKHEVHFLHEESILERVQQHIESKLLGSNSSRMYFTQTLLPGLAGPSGEMVKSTTSLTSSSTSGSSDKVYAHQMVRTDSREQKLDAFLQPLSKPLSSQPQAIVTEDKTDISSGRARQQDEEMLELPAPAEVAAKNQSLEGDTTKGTSEMSEKRGPTSSNPRKRHREDSDVEMVEDDSRKEMTAACTPRRRIINLTSVLSLQEEINEQGHEVLREMLHNHSFVGCVNPQWALAQHQTKLYLLNTTKLSEELFYQILIYDFANFGVLRLSEPAPLFDLAMLALDSPESGWTEEDGPKEGLAEYIVEFLKKKAEMLADYFSLEIDEEGNLIGLPLLIDNYVPPLEGLPIFILRLATEVNWDEEKECFESLSKECAMFYSIRKQYISEESTLSGQQSEVPGSIPNSWKWTVEHIVYKALRSHILPPKHFTEDGNILQLANLPDLYKVFERC

SEQ ID NO: 316 - protein, 756 aa, Homo sapiens
MSFVAGVIRRLDETVVNRIAAGEVIQRPANAIKEMIENCLDAKSTSIQVIVKEGGLKLIQIQDSGTGIRKEDLDIVCERFTTSKLQSFEDLASISTYGFRGEALASISHVAHVTITTKTADGKCAYRASYSDGKLKAPPKPCAGNQGTQITVEDLFYNIATRRKALKNPSEEYGKILEVVGRYSVHNAGISFSVKKQGETVADVRTLPNASTVDNIRSVFGNAVSRELIEIGCEDKTLAFKMNGYISNANYSVKKCIFLLFINHRLVESTSLRKAIETVYAAYLPKNTHPFLYLSLEISPQNVDVNVHPTKHEVHFLHEESILERVQQHIESKLLGSNSSRMYFTQTLLPGLAGPSGEMVKSTTSLTSSSTSGSSDKVYAHQMVRTDSREQKLDAFLQPLSKPLSSQPQAIVTEDKTDISSGRARQQDEEMLELPAPAEVAAKNQSLEGDTTKGTSEMSEKRGPTSSNPRKRHREDSDVEMVEDDSRKEMTAACTPRRRIINLTSVLSLQEEINEQGHEVLREMLHNHSFVGCVNPQWALAQHQTKLYLLNTTKLSEELFYQILIYDFANFGVLRLSEPAPLFDLAMLALDSPESGWTEEDGPKEGLAEYIVEFLKKKAEMLADYFSLEIDEEGNLIGLPLLIDNYVPPLEGLPIFILRLATEVNWDEEKECFESLSKECAMFYSIRKQYISEESTLSGQQSEVPGSIPNSWKWTVEHIVYKALRSHILPPKHFTEDGNILQLANLPDLYKVFERC

SEQ ID NO: 317 - protein, 756 aa, Homo sapiens
MSFVAGVIRRLDETVVNRIAAGEVIQRPANAIKEMIENCLDAKSTSIQVIVKEGGLKLIQIQDNATGIRKEDLDIVCERFTTSKLQSFEDLASISTYGFRGEALASISHVAHVTITTKTADGKCAYRASYSDGKLKAPPKPCAGNQGTQITVEDLFYNIATRRKALKNPSEEYGKILEVVGRYSVHNAGISFSVKKQGETVADVRTLPNASTVDNIRSVFGNAVSRELIEIGCEDKTLAFKMNGYISNANYSVKKCIFLLFINHRLVESTSLRKAIETVYAAYLPKNTHPFLYLSLEISPQNVDVNVHPTKHEVHFLHEESILERVQQHIESKLLGSNSSRMYFTQTLLPGLAGPSGEMVKSTTSLTSSSTSGSSDKVYAHQMVRTDSREQKLDAFLQPLSKPLSSQPQAIVTEDKTDISSGRARQQDEEMLELPAPAEVAAKNQSLEGDTTKGTSEMSEKRGPTSSNPRKRHREDSDVEMVEDDSRKEMTAACTPRRRIINLTSVLSLQEEINEQGHEVLREMLHNHSFVGCVNPQWALAQHQTKLYLLNTTKLSEELFYQILIYDFANFGVLRLSEPAPLFDLAMLALDSPESGWTEEDGPKEGLAEYIVEFLKKKAEMLADYFSLEIDEEGNLIGLPLLIDNYVPPLEGLPIFILRLATEVNWDEEKECFESLSKECAMFYSIRKQYISEESTLSGQQSEVPGSIPNSWKWTVEHIVYKALRSHILPPKHFTEDGNILQLANLPDLYKVFERC

SEQ ID NO: 318 - protein, 756 aa, Homo sapiens
MSFVAGVIRRLDETVVNRIAAGEVIQRPANAIKEMIENCLDAKSTSIQVIVKEGGLKLIQIQDNDTGIRKEDLDIVCERFTTSKLQSFEDLASISTYGFRGEALASISHVAHVTITTKTADGKCAYRASYSDGKLKAPPKPCAGNQGTQITVEDLFYNIATRRKALKNPSEEYGKILEVVGRYSVHNAGISFSVKKQGETVADVRTLPNASTVDNIRSVFGNAVSRELIEIGCEDKTLAFKMNGYISNANYSVKKCIFLLFINHRLVESTSLRKAIETVYAAYLPKNTHPFLYLSLEISPQNVDVNVHPTKHEVHFLHEESILERVQQHIESKLLGSNSSRMYFTQTLLPGLAGPSGEMVKSTTSLTSSSTSGSSDKVYAHQMVRTDSREQKLDAFLQPLSKPLSSQPQAIVTEDKTDISSGRARQQDEEMLELPAPAEVAAKNQSLEGDTTKGTSEMSEKRGPTSSNPRKRHREDSDVEMVEDDSRKEMTAACTPRRRIINLTSVLSLQEEINEQGHEVLREMLHNHSFVGCVNPQWALAQHQTKLYLLNTTKLSEELFYQILIYDFANFGVLRLSEPAPLFDLAMLALDSPESGWTEEDGPKEGLAEYIVEFLKKKAEMLADYFSLEIDEEGNLIGLPLLIDNYVPPLEGLPIFILRLATEVNWDEEKECFESLSKECAMFYSIRKQYISEESTLSGQQSEVPGSIPNSWKWTVEHIVYKALRSHILPPKHFTEDGNILQLANLPDLYKVFERC

SEQ ID NO: 319 - protein, 756 aa, Homo sapiens
MSFVAGVIRRLDETVVNRIAAGEVIQRPANAIKEMIENCLDAKSTSIQVIVKEGGLKLIQIQDNETGIRKEDLDIVCERFTTSKLQSFEDLASISTYGFRGEALASISHVAHVTITTKTADGKCAYRASYSDGKLKAPPKPCAGNQGTQITVEDLFYNIATRRKALKNPSEEYGKILEVVGRYSVHNAGISFSVKKQGETVADVRTLPNASTVDNIRSVFGNAVSRELIEIGCEDKTLAFKMNGYISNANYSVKKCIFLLFINHRLVESTSLRKAIETVYAAYLPKNTHPFLYLSLEISPQNVDVNVHPTKHEVHFLHEESILERVQQHIESKLLGSNSSRMYFTQTLLPGLAGPSGEMVKSTTSLTSSSTSGSSDKVYAHQMVRTDSREQKLDAFLQPLSKPLSSQPQAIVTEDKTDISSGRARQQDEEMLELPAPAEVAAKNQSLEGDTTKGTSEMSEKRGPTSSNPRKRHREDSDVEMVEDDSRKEMTAACTPRRRIINLTSVLSLQEEINEQGHEVLREMLHNHSFVGCVNPQWALAQHQTKLYLLNTTKLSEELFYQILIYDFANFGVLRLSEPAPLFDLAMLALDSPESGWTEEDGPKEGLAEYIVEFLKKKAEMLADYFSLEIDEEGNLIGLPLLIDNYVPPLEGLPIFILRLATEVNWDEEKECFESLSKECAMFYSIRKQYISEESTLSGQQSEVPGSIPNSWKWTVEHIVYKALRSHILPPKHFTEDGNILQLANLPDLYKVFERC

SEQ ID NO: 320 - protein, 756 aa, Homo sapiens
MSFVAGVIRRLDETVVNRIAAGEVIQRPANAIKEMIENCLDAKSTSIQVIVKEGGLKLIQIQDNSTGIRKEDLDIVCERFTTSKLQSFEDLASISTYGFRGEALASISHVAHVTITTKTADGKCAYRASYSDGKLKAPPKPCAGNQGTQITVEDLFYNIATRRKALKNPSEEYGKILEVVGRYSVHNAGISFSVKKQGETVADVRTLPNASTVDNIRSVFGNAVSRELIEIGCEDKTLAFKMNGYISNANYSVKKCIFLLFINHRLVESTSLRKAIETVYAAYLPKNTHPFLYLSLEISPQNVDVNVHPTKHEVHFLHEESILERVQQHIESKLLGSNSSRMYFTQTLLPGLAGPSGEMVKSTTSLTSSSTSGSSDKVYAHQMVRTDSREQKLDAFLQPLSKPLSSQPQAIVTEDKTDISSGRARQQDEEMLELPAPAEVAAKNQSLEGDTTKGTSEMSEKRGPTSSNPRKRHREDSDVEMVEDDSRKEMTAACTPRRRIINLTSVLSLQEEINEQGHEVLREMLHNHSFVGCVNPQWALAQHQTKLYLLNTTKLSEELFYQILIYDFANFGVLRLSEPAPLFDLAMLALDSPESGWTEEDGPKEGLAEYIVEFLKKKAEMLADYFSLEIDEEGNLIGLPLLIDNYVPPLEGLPIFILRLATEVNWDEEKECFESLSKECAMFYSIRKQYISEESTLSGQQSEVPGSIPNSWKWTVEHIVYKALRSHILPPKHFTEDGNILQLANLPDLYKVFERC

SEQ ID NO: 321 - protein, 756 aa, Homo sapiens
MSFVAGVIRRLDETVVNRIAAGEVIQRPANAIKEMIENCLDAKSTSIQVIVKEGGLKLIQIQDNVTGIRKEDLDIVCERFTTSKLQSFEDLASISTYGFRGEALASISHVAHVTITTKTADGKCAYRASYSDGKLKAPPKPCAGNQGTQITVEDLFYNIATRRKALKNPSEEYGKILEVVGRYSVHNAGISFSVKKQGETVADVRTLPNASTVDNIRSVFGNAVSRELIEIGCEDKTLAFKMNGYISNANYSVKKCIFLLFINHRLVESTSLRKAIETVYAAYLPKNTHPFLYLSLEISPQNVDVNVHPTKHEVHFLHEESILERVQQHIESKLLGSNSSRMYFTQTLLPGLAGPSGEMVKSTTSLTSSSTSGSSDKVYAHQMVRTDSREQKLDAFLQPLSKPLSSQPQAIVTEDKTDISSGRARQQDEEMLELPAPAEVAAKNQSLEGDTTKGTSEMSEKRGPTSSNPRKRHREDSDVEMVEDDSRKEMTAACTPRRRIINLTSVLSLQEEINEQGHEVLREMLHNHSFVGCVNPQWALAQHQTKLYLLNTTKLSEELFYQILIYDFANFGVLRLSEPAPLFDLAMLALDSPESGWTEEDGPKEGLAEYIVEFLKKKAEMLADYFSLEIDEEGNLIGLPLLIDNYVPPLEGLPIFILRLATEVNWDEEKECFESLSKECAMFYSIRKQYISEESTLSGQQSEVPGSIPNSWKWTVEHIVYKALRSHILPPKHFTEDGNILQLANLPDLYKVFERC

SEQ ID NO: 322 - protein, 756 aa, Homo sapiens
MSFVAGVIRRLDETVVNRIAAGEVIQRPANAIKEMIENCLDAKSTSIQVIVKEGGLKLIQIQDNGTWIRKEDLDIVCERFTTSKLQSFEDLASISTYGFRGEALASISHVAHVTITTKTADGKCAYRASYSDGKLKAPPKPCAGNQGTQITVEDLFYNIATRRKALKNPSEEYGKILEVVGRYSVHNAGISFSVKKQGETVADVRTLPNASTVDNIRSVFGNAVSRELIEIGCEDKTLAFKMNGYISNANYSVKKCIFLLFINHRLVESTSLRKAIETVYAAYLPKNTHPFLYLSLEISPQNVDVNVHPTKHEVHFLHEESILERVQQHIESKLLGSNSSRMYFTQTLLPGLAGPSGEMVKSTTSLTSSSTSGSSDKVYAHQMVRTDSREQKLDAFLQPLSKPLSSQPQAIVTEDKTDISSGRARQQDEEMLELPAPAEVAAKNQSLEGDTTKGTSEMSEKRGPTSSNPRKRHREDSDVEMVEDDSRKEMTAACTPRRRIINLTSVLSLQEEINEQGHEVLREMLHNHSFVGCVNPQWALAQHQTKLYLLNTTKLSEELFYQILIYDFANFGVLRLSEPAPLFDLAMLALDSPESGWTEEDGPKEGLAEYIVEFLKKKAEMLADYFSLEIDEEGNLIGLPLLIDNYVPPLEGLPIFILRLATEVNWDEEKECFESLSKECAMFYSIRKQYISEESTLSGQQSEVPGSIPNSWKWTVEHIVYKALRSHILPPKHFTEDGNILQLANLPDLYKVFERC

SEQ ID NO: 323 - protein, 756 aa, Homo sapiens
MSFVAGVIRRLDETVVNRIAAGEVIQRPANAIKEMIENCLDAKSTSIQVIVKEGGLKLIQIQDNGTGFRKEDLDIVCERFTTSKLQSFEDLASISTYGFRGEALASISHVAHVTITTKTADGKCAYRASYSDGKLKAPPKPCAGNQGTQITVEDLFYNIATRRKALKNPSEEYGKILEVVGRYSVHNAGISFSVKKQGETVADVRTLPNASTVDNIRSVFGNAVSRELIEIGCEDKTLAFKMNGYISNANYSVKKCIFLLFINHRLVESTSLRKAIETVYAAYLPKNTHPFLYLSLEISPQNVDVNVHPTKHEVHFLHEESILERVQQHIESKLLGSNSSRMYFTQTLLPGLAGPSGEMVKSTTSLTSSSTSGSSDKVYAHQMVRTDSREQKLDAFLQPLSKPLSSQPQAIVTEDKTDISSGRARQQDEEMLELPAPAEVAAKNQSLEGDTTKGTSEMSEKRGPTSSNPRKRHREDSDVEMVEDDSRKEMTAACTPRRRIINLTSVLSLQEEINEQGHEVLREMLHNHSFVGCVNPQWALAQHQTKLYLLNTTKLSEELFYQILIYDFANFGVLRLSEPAPLFDLAMLALDSPESGWTEEDGPKEGLAEYIVEFLKKKAEMLADYFSLEIDEEGNLIGLPLLIDNYVPPLEGLPIFILRLATEVNWDEEKECFESLSKECAMFYSIRKQYISEESTLSGQQSEVPGSIPNSWKWTVEHIVYKALRSHILPPKHFTEDGNILQLANLPDLYKVFERC

SEQ ID NO: 324 - protein, 756 aa, Homo sapiens
MSFVAGVIRRLDETVVNRIAAGEVIQRPANAIKEMIENCLDAKSTSIQVIVKEGGLKLIQIQDNGTGNRKEDLDIVCERFTTSKLQSFEDLASISTYGFRGEALASISHVAHVTITTKTADGKCAYRASYSDGKLKAPPKPCAGNQGTQITVEDLFYNIATRRKALKNPSEEYGKILEVVGRYSVHNAGISFSVKKQGETVADVRTLPNASTVDNIRSVFGNAVSRELIEIGCEDKTLAFKMNGYISNANYSVKKCIFLLFINHRLVESTSLRKAIETVYAAYLPKNTHPFLYLSLEISPQNVDVNVHPTKHEVHFLHEESILERVQQHIESKLLGSNSSRMYFTQTLLPGLAGPSGEMVKSTTSLTSSSTSGSSDKVYAHQMVRTDSREQKLDAFLQPLSKPLSSQPQAIVTEDKTDISSGRARQQDEEMLELPAPAEVAAKNQSLEGDTTKGTSEMSEKRGPTSSNPRKRHREDSDVEMVEDDSRKEMTAACTPRRRIINLTSVLSLQEEINEQGHEVLREMLHNHSFVGCVNPQWALAQHQTKLYLLNTTKLSEELFYQILIYDFANFGVLRLSEPAPLFDLAMLALDSPESGWTEEDGPKEGLAEYIVEFLKKKAEMLADYFSLEIDEEGNLIGLPLLIDNYVPPLEGLPIFILRLATEVNWDEEKECFESLSKECAMFYSIRKQYISEESTLSGQQSEVPGSIPNSWKWTVEHIVYKALRSHILPPKHFTEDGNILQLANLPDLYKVFERC

SEQ ID NO: 325 - protein, 756 aa, Homo sapiens
MSFVAGVIRRLDETVVNRIAAGEVIQRPANAIKEMIENCLDAKSTSIQVIVKEGGLKLIQIQDNGTGSRKEDLDIVCERFTTSKLQSFEDLASISTYGFRGEALASISHVAHVTITTKTADGKCAYRASYSDGKLKAPPKPCAGNQGTQITVEDLFYNIATRRKALKNPSEEYGKILEVVGRYSVHNAGISFSVKKQGETVADVRTLPNASTVDNIRSVFGNAVSRELIEIGCEDKTLAFKMNGYISNANYSVKKCIFLLFINHRLVESTSLRKAIETVYAAYLPKNTHPFLYLSLEISPQNVDVNVHPTKHEVHFLHEESILERVQQHIESKLLGSNSSRMYFTQTLLPGLAGPSGEMVKSTTSLTSSSTSGSSDKVYAHQMVRTDSREQKLDAFLQPLSKPLSSQPQAIVTEDKTDISSGRARQQDEEMLELPAPAEVAAKNQSLEGDTTKGTSEMSEKRGPTSSNPRKRHREDSDVEMVEDDSRKEMTAACTPRRRIINLTSVLSLQEEINEQGHEVLREMLHNHSFVGCVNPQWALAQHQTKLYLLNTTKLSEELFYQILIYDFANFGVLRLSEPAPLFDLAMLALDSPESGWTEEDGPKEGLAEYIVEFLKKKAEMLADYFSLEIDEEGNLIGLPLLIDNYVPPLEGLPIFILRLATEVNWDEEKECFESLSKECAMFYSIRKQYISEESTLSGQQSEVPGSIPNSWKWTVEHIVYKALRSHILPPKHFTEDGNILQLANLPDLYKVFERC

SEQ ID NO: 326 - protein, 756 aa, Homo sapiens
MSFVAGVIRRLDETVVNRIAAGEVIQRPANAIKEMIENCLDAKSTSIQVIVKEGGLKLIQIQDNGTGIRIEDLDIVCERFTTSKLQSFEDLASISTYGFRGEALASISHVAHVTITTKTADGKCAYRASYSDGKLKAPPKPCAGNQGTQITVEDLFYNIATRRKALKNPSEEYGKILEVVGRYSVHNAGISFSVKKQGETVADVRTLPNASTVDNIRSVFGNAVSRELIEIGCEDKTLAFKMNGYISNANYSVKKCIFLLFINHRLVESTSLRKAIETVYAAYLPKNTHPFLYLSLEISPQNVDVNVHPTKHEVHFLHEESILERVQQHIESKLLGSNSSRMYFTQTLLPGLAGPSGEMVKSTTSLTSSSTSGSSDKVYAHQMVRTDSREQKLDAFLQPLSKPLSSQPQAIVTEDKTDISSGRARQQDEEMLELPAPAEVAAKNQSLEGDTTKGTSEMSEKRGPTSSNPRKRHREDSDVEMVEDDSRKEMTAACTPRRRIINLTSVLSLQEEINEQGHEVLREMLHNHSFVGCVNPQWALAQHQTKLYLLNTTKLSEELFYQILIYDFANFGVLRLSEPAPLFDLAMLALDSPESGWTEEDGPKEGLAEYIVEFLKKKAEMLADYFSLEIDEEGNLIGLPLLIDNYVPPLEGLPIFILRLATEVNWDEEKECFESLSKECAMFYSIRKQYISEESTLSGQQSEVPGSIPNSWKWTVEHIVYKALRSHILPPKHFTEDGNILQLANLPDLYKVFERC

SEQ ID NO: 327 - protein, 756 aa, Homo sapiens
MSFVAGVIRRLDETVVNRIAAGEVIQRPANAIKEMIENCLDAKSTSIQVIVKEGGLKLIQIQDNGTGIRNEDLDIVCERFTTSKLQSFEDLASISTYGFRGEALASISHVAHVTITTKTADGKCAYRASYSDGKLKAPPKPCAGNQGTQITVEDLFYNIATRRKALKNPSEEYGKILEVVGRYSVHNAGISFSVKKQGETVADVRTLPNASTVDNIRSVFGNAVSRELIEIGCEDKTLAFKMNGYISNANYSVKKCIFLLFINHRLVESTSLRKAIETVYAAYLPKNTHPFLYLSLEISPQNVDVNVHPTKHEVHFLHEESILERVQQHIESKLLGSNSSRMYFTQTLLPGLAGPSGEMVKSTTSLTSSSTSGSSDKVYAHQMVRTDSREQKLDAFLQPLSKPLSSQPQAIVTEDKTDISSGRARQQDEEMLELPAPAEVAAKNQSLEGDTTKGTSEMSEKRGPTSSNPRKRHREDSDVEMVEDDSRKEMTAACTPRRRIINLTSVLSLQEEINEQGHEVLREMLHNHSFVGCVNPQWALAQHQTKLYLLNTTKLSEELFYQILIYDFANFGVLRLSEPAPLFDLAMLALDSPESGWTEEDGPKEGLAEYIVEFLKKKAEMLADYFSLEIDEEGNLIGLPLLIDNYVPPLEGLPIFILRLATEVNWDEEKECFESLSKECAMFYSIRKQYISEESTLSGQQSEVPGSIPNSWKWTVEHIVYKALRSHILPPKHFTEDGNILQLANLPDLYKVFERC

SEQ ID NO: 328 - protein, 756 aa, Homo sapiens
MSFVAGVIRRLDETVVNRIAAGEVIQRPANAIKEMIENCLDAKSTSIQVIVKEGGLKLIQIQDNGTGIRKEGLDIVCERFTTSKLQSFEDLASISTYGFRGEALASISHVAHVTITTKTADGKCAYRASYSDGKLKAPPKPCAGNQGTQITVEDLFYNIATRRKALKNPSEEYGKILEVVGRYSVHNAGISFSVKKQGETVADVRTLPNASTVDNIRSVFGNAVSRELIEIGCEDKTLAFKMNGYISNANYSVKKCIFLLFINHRLVESTSLRKAIETVYAAYLPKNTHPFLYLSLEISPQNVDVNVHPTKHEVHFLHEESILERVQQHIESKLLGSNSSRMYFTQTLLPGLAGPSGEMVKSTTSLTSSSTSGSSDKVYAHQMVRTDSREQKLDAFLQPLSKPLSSQPQAIVTEDKTDISSGRARQQDEEMLELPAPAEVAAKNQSLEGDTTKGTSEMSEKRGPTSSNPRKRHREDSDVEMVEDDSRKEMTAACTPRRRIINLTSVLSLQEEINEQGHEVLREMLHNHSFVGCVNPQWALAQHQTKLYLLNTTKLSEELFYQILIYDFANFGVLRLSEPAPLFDLAMLALDSPESGWTEEDGPKEGLAEYIVEFLKKKAEMLADYFSLEIDEEGNLIGLPLLIDNYVPPLEGLPIFILRLATEVNWDEEKECFESLSKECAMFYSIRKQYISEESTLSGQQSEVPGSIPNSWKWTVEHIVYKALRSHILPPKHFTEDGNILQLANLPDLYKVFERC

SEQ ID NO: 329 - protein, 756 aa, Homo sapiens
MSFVAGVIRRLDETVVNRIAAGEVIQRPANAIKEMIENCLDAKSTSIQVIVKEGGLKLIQIQDNGTGIRKEDMDIVCERFTTSKLQSFEDLASISTYGFRGEALASISHVAHVTITTKTADGKCAYRASYSDGKLKAPPKPCAGNQGTQITVEDLFYNIATRRKALKNPSEEYGKILEVVGRYSVHNAGISFSVKKQGETVADVRTLPNASTVDNIRSVFGNAVSRELIEIGCEDKTLAFKMNGYISNANYSVKKCIFLLFINHRLVESTSLRKAIETVYAAYLPKNTHPFLYLSLEISPQNVDVNVHPTKHEVHFLHEESILERVQQHIESKLLGSNSSRMYFTQTLLPGLAGPSGEMVKSTTSLTSSSTSGSSDKVYAHQMVRTDSREQKLDAFLQPLSKPLSSQPQAIVTEDKTDISSGRARQQDEEMLELPAPAEVAAKNQSLEGDTTKGTSEMSEKRGPTSSNPRKRHREDSDVEMVEDDSRKEMTAACTPRRRIINLTSVLSLQEEINEQGHEVLREMLHNHSFVGCVNPQWALAQHQTKLYLLNTTKLSEELFYQILIYDFANFGVLRLSEPAPLFDLAMLALDSPESGWTEEDGPKEGLAEYIVEFLKKKAEMLADYFSLEIDEEGNLIGLPLLIDNYVPPLEGLPIFILRLATEVNWDEEKECFESLSKECAMFYSIRKQYISEESTLSGQQSEVPGSIPNSWKWTVEHIVYKALRSHILPPKHFTEDGNILQLANLPDLYKVFERC

SEQ ID NO: 330 - protein, 756 aa, Homo sapiens
MSFVAGVIRRLDETVVNRIAAGEVIQRPANAIKEMIENCLDAKSTSIQVIVKEGGLKLIQIQDNGTGIRKEDPDIVCERFTTSKLQSFEDLASISTYGFRGEALASISHVAHVTITTKTADGKCAYRASYSDGKLKAPPKPCAGNQGTQITVEDLFYNIATRRKALKNPSEEYGKILEVVGRYSVHNAGISFSVKKQGETVADVRTLPNASTVDNIRSVFGNAVSRELIEIGCEDKTLAFKMNGYISNANYSVKKCIFLLFINHRLVESTSLRKAIETVYAAYLPKNTHPFLYLSLEISPQNVDVNVHPTKHEVHFLHEESILERVQQHIESKLLGSNSSRMYFTQTLLPGLAGPSGEMVKSTTSLTSSSTSGSSDKVYAHQMVRTDSREQKLDAFLQPLSKPLSSQPQAIVTEDKTDISSGRARQQDEEMLELPAPAEVAAKNQSLEGDTTKGTSEMSEKRGPTSSNPRKRHREDSDVEMVEDDSRKEMTAACTPRRRIINLTSVLSLQEEINEQGHEVLREMLHNHSFVGCVNPQWALAQHQTKLYLLNTTKLSEELFYQILIYDFANFGVLRLSEPAPLFDLAMLALDSPESGWTEEDGPKEGLAEYIVEFLKKKAEMLADYFSLEIDEEGNLIGLPLLIDNYVPPLEGLPIFILRLATEVNWDEEKECFESLSKECAMFYSIRKQYISEESTLSGQQSEVPGSIPNSWKWTVEHIVYKALRSHILPPKHFTEDGNILQLANLPDLYKVFERC

SEQ ID NO: 331 - protein, 756 aa, Homo sapiens
MSFVAGVIRRLDETVVNRIAAGEVIQRPANAIKEMIENCLDAKSTSIQVIVKEGGLKLIQIQDNGTGIRKEDLLIVCERFTTSKLQSFEDLASISTYGFRGEALASISHVAHVTITTKTADGKCAYRASYSDGKLKAPPKPCAGNQGTQITVEDLFYNIATRRKALKNPSEEYGKILEVVGRYSVHNAGISFSVKKQGETVADVRTLPNASTVDNIRSVFGNAVSRELIEIGCEDKTLAFKMNGYISNANYSVKKCIFLLFINHRLVESTSLRKAIETVYAAYLPKNTHPFLYLSLEISPQNVDVNVHPTKHEVHFLHEESILERVQQHIESKLLGSNSSRMYFTQTLLPGLAGPSGEMVKSTTSLTSSSTSGSSDKVYAHQMVRTDSREQKLDAFLQPLSKPLSSQPQAIVTEDKTDISSGRARQQDEEMLELPAPAEVAAKNQSLEGDTTKGTSEMSEKRGPTSSNPRKRHREDSDVEMVEDDSRKEMTAACTPRRRIINLTSVLSLQEEINEQGHEVLREMLHNHSFVGCVNPQWALAQHQTKLYLLNTTKLSEELFYQILIYDFANFGVLRLSEPAPLFDLAMLALDSPESGWTEEDGPKEGLAEYIVEFLKKKAEMLADYFSLEIDEEGNLIGLPLLIDNYVPPLEGLPIFILRLATEVNWDEEKECFESLSKECAMFYSIRKQYISEESTLSGQQSEVPGSIPNSWKWTVEHIVYKALRSHILPPKHFTEDGNILQLANLPDLYKVFERC

SEQ ID NO: 332 - protein, 756 aa, Homo sapiens
MSFVAGVIRRLDETVVNRIAAGEVIQRPANAIKEMIENCLDAKSTSIQVIVKEGGLKLIQIQDNGTGIRKEDLDIECERFTTSKLQSFEDLASISTYGFRGEALASISHVAHVTITTKTADGKCAYRASYSDGKLKAPPKPCAGNQGTQITVEDLFYNIATRRKALKNPSEEYGKILEVVGRYSVHNAGISFSVKKQGETVADVRTLPNASTVDNIRSVFGNAVSRELIEIGCEDKTLAFKMNGYISNANYSVKKCIFLLFINHRLVESTSLRKAIETVYAAYLPKNTHPFLYLSLEISPQNVDVNVHPTKHEVHFLHEESILERVQQHIESKLLGSNSSRMYFTQTLLPGLAGPSGEMVKSTTSLTSSSTSGSSDKVYAHQMVRTDSREQKLDAFLQPLSKPLSSQPQAIVTEDKTDISSGRARQQDEEMLELPAPAEVAAKNQSLEGDTTKGTSEMSEKRGPTSSNPRKRHREDSDVEMVEDDSRKEMTAACTPRRRIINLTSVLSLQEEINEQGHEVLREMLHNHSFVGCVNPQWALAQHQTKLYLLNTTKLSEELFYQILIYDFANFGVLRLSEPAPLFDLAMLALDSPESGWTEEDGPKEGLAEYIVEFLKKKAEMLADYFSLEIDEEGNLIGLPLLIDNYVPPLEGLPIFILRLATEVNWDEEKECFESLSKECAMFYSIRKQYISEESTLSGQQSEVPGSIPNSWKWTVEHIVYKALRSHILPPKHFTEDGNILQLANLPDLYKVFERC

SEQ ID NO: 333 - protein, 756 aa, Homo sapiens
MSFVAGVIRRLDETVVNRIAAGEVIQRPANAIKEMIENCLDAKSTSIQVIVKEGGLKLIQIQDNGTGIRKEDLDIVSERFTTSKLQSFEDLASISTYGFRGEALASISHVAHVTITTKTADGKCAYRASYSDGKLKAPPKPCAGNQGTQITVEDLFYNIATRRKALKNPSEEYGKILEVVGRYSVHNAGISFSVKKQGETVADVRTLPNASTVDNIRSVFGNAVSRELIEIGCEDKTLAFKMNGYISNANYSVKKCIFLLFINHRLVESTSLRKAIETVYAAYLPKNTHPFLYLSLEISPQNVDVNVHPTKHEVHFLHEESILERVQQHIESKLLGSNSSRMYFTQTLLPGLAGPSGEMVKSTTSLTSSSTSGSSDKVYAHQMVRTDSREQKLDAFLQPLSKPLSSQPQAIVTEDKTDISSGRARQQDEEMLELPAPAEVAAKNQSLEGDTTKGTSEMSEKRGPTSSNPRKRHREDSDVEMVEDDSRKEMTAACTPRRRIINLTSVLSLQEEINEQGHEVLREMLHNHSFVGCVNPQWALAQHQTKLYLLNTTKLSEELFYQILIYDFANFGVLRLSEPAPLFDLAMLALDSPESGWTEEDGPKEGLAEYIVEFLKKKAEMLADYFSLEIDEEGNLIGLPLLIDNYVPPLEGLPIFILRLATEVNWDEEKECFESLSKECAMFYSIRKQYISEESTLSGQQSEVPGSIPNSWKWTVEHIVYKALRSHILPPKHFTEDGNILQLANLPDLYKVFERC

SEQ ID NO: 334 - protein, 756 aa, Homo sapiens
MSFVAGVIRRLDETVVNRIAAGEVIQRPANAIKEMIENCLDAKSTSIQVIVKEGGLKLIQIQDNGTGIRKEDLDIVCEWFTTSKLQSFEDLASISTYGFRGEALASISHVAHVTITTKTADGKCAYRASYSDGKLKAPPKPCAGNQGTQITVEDLFYNIATRRKALKNPSEEYGKILEVVGRYSVHNAGISFSVKKQGETVADVRTLPNASTVDNIRSVFGNAVSRELIEIGCEDKTLAFKMNGYISNANYSVKKCIFLLFINHRLVESTSLRKAIETVYAAYLPKNTHPFLYLSLEISPQNVDVNVHPTKHEVHFLHEESILERVQQHIESKLLGSNSSRMYFTQTLLPGLAGPSGEMVKSTTSLTSSSTSGSSDKVYAHQMVRTDSREQKLDAFLQPLSKPLSSQPQAIVTEDKTDISSGRARQQDEEMLELPAPAEVAAKNQSLEGDTTKGTSEMSEKRGPTSSNPRKRHREDSDVEMVEDDSRKEMTAACTPRRRIINLTSVLSLQEEINEQGHEVLREMLHNHSFVGCVNPQWALAQHQTKLYLLNTTKLSEELFYQILIYDFANFGVLRLSEPAPLFDLAMLALDSPESGWTEEDGPKEGLAEYIVEFLKKKAEMLADYFSLEIDEEGNLIGLPLLIDNYVPPLEGLPIFILRLATEVNWDEEKECFESLSKECAMFYSIRKQYISEESTLSGQQSEVPGSIPNSWKWTVEHIVYKALRSHILPPKHFTEDGNILQLANLPDLYKVFERC

SEQ ID NO: 335 - protein, 756 aa, Homo sapiens; identical to SEQ ID NO: 334

SEQ ID NO: 336 - protein, 756 aa, Homo sapiens
MSFVAGVIRRLDETVVNRIAAGEVIQRPANAIKEMIENCLDAKSTSIQVIVKEGGLKLIQIQDNGTGIRKEDLDIVCERITTSKLQSFEDLASISTYGFRGEALASISHVAHVTITTKTADGKCAYRASYSDGKLKAPPKPCAGNQGTQITVEDLFYNIATRRKALKNPSEEYGKILEVVGRYSVHNAGISFSVKKQGETVADVRTLPNASTVDNIRSVFGNAVSRELIEIGCEDKTLAFKMNGYISNANYSVKKCIFLLFINHRLVESTSLRKAIETVYAAYLPKNTHPFLYLSLEISPQNVDVNVHPTKHEVHFLHEESILERVQQHIESKLLGSNSSRMYFTQTLLPGLAGPSGEMVKSTTSLTSSSTSGSSDKVYAHQMVRTDSREQKLDAFLQPLSKPLSSQPQAIVTEDKTDISSGRARQQDEEMLELPAPAEVAAKNQSLEGDTTKGTSEMSEKRGPTSSNPRKRHREDSDVEMVEDDSRKEMTAACTPRRRIINLTSVLSLQEEINEQGHEVLREMLHNHSFVGCVNPQWALAQHQTKLYLLNTTKLSEELFYQILIYDFANFGVLRLSEPAPLFDLAMLALDSPESGWTEEDGPKEGLAEYIVEFLKKKAEMLADYFSLEIDEEGNLIGLPLLIDNYVPPLEGLPIFILRLATEVNWDEEKECFESLSKECAMFYSIRKQYISEESTLSGQQSEVPGSIPNSWKWTVEHIVYKALRSHILPPKHFTEDGNILQLANLPDLYKVFERC

SEQ ID NO: 337 - protein, 756 aa, Homo sapiens
MSFVAGVIRRLDETVVNRIAAGEVIQRPANAIKEMIENCLDAKSTSIQVIVKEGGLKLIQIQDNGTGIRKEDLDIVCERSTTSKLQSFEDLASISTYGFRGEALASISHVAHVTITTKTADGKCAYRASYSDGKLKAPPKPCAGNQGTQITVEDLFYNIATRRKALKNPSEEYGKILEVVGRYSVHNAGISFSVKKQGETVADVRTLPNASTVDNIRSVFGNAVSRELIEIGCEDKTLAFKMNGYISNANYSVKKCIFLLFINHRLVESTSLRKAIETVYAAYLPKNTHPFLYLSLEISPQNVDVNVHPTKHEVHFLHEESILERVQQHIESKLLGSNSSRMYFTQTLLPGLAGPSGEMVKSTTSLTSSSTSGSSDKVYAHQMVRTDSREQKLDAFLQPLSKPLSSQPQAIVTEDKTDISSGRARQQDEEMLELPAPAEVAAKNQSLEGDTTKGTSEMSEKRGPTSSNPRKRHREDSDVEMVEDDSRKEMTAACTPRRRIINLTSVLSLQEEINEQGHEVLREMLHNHSFVGCVNPQWALAQHQTKLYLLNTTKLSEELFYQILIYDFANFGVLRLSEPAPLFDLAMLALDSPESGWTEEDGPKEGLAEYIVEFLKKKAEMLADYFSLEIDEEGNLIGLPLLIDNYVPPLEGLPIFILRLATEVNWDEEKECFESLSKECAMFYSIRKQYISEESTLSGQQSEVPGSIPNSWKWTVEHIVYKALRSHILPPKHFTEDGNILQLANLPDLYKVFERC

SEQ ID NO: 338 - protein, 756 aa, Homo sapiens
MSFVAGVIRRLDETVVNRIAAGEVIQRPANAIKEMIENCLDAKSTSIQVIVKEGGLKLIQIQDNGTGIRKEDLDIVCERVTTSKLQSFEDLASISTYGFRGEALASISHVAHVTITTKTADGKCAYRASYSDGKLKAPPKPCAGNQGTQITVEDLFYNIATRRKALKNPSEEYGKILEVVGRYSVHNAGISFSVKKQGETVADVRTLPNASTVDNIRSVFGNAVSRELIEIGCEDKTLAFKMNGYISNANYSVKKCIFLLFINHRLVESTSLRKAIETVYAAYLPKNTHPFLYLSLEISPQNVDVNVHPTKHEVHFLHEESILERVQQHIESKLLGSNSSRMYFTQTLLPGLAGPSGEMVKSTTSLTSSSTSGSSDKVYAHQMVRTDSREQKLDAFLQPLSKPLSSQPQAIVTEDKTDISSGRARQQDEEMLELPAPAEVAAKNQSLEGDTTKGTSEMSEKRGPTSSNPRKRHREDSDVEMVEDDSRKEMTAACTPRRRIINLTSVLSLQEEINEQGHEVLREMLHNHSFVGCVNPQWALAQHQTKLYLLNTTKLSEELFYQILIYDFANFGVLRLSEPAPLFDLAMLALDSPESGWTEEDGPKEGLAEYIVEFLKKKAEMLADYFSLEIDEEGNLIGLPLLIDNYVPPLEGLPIFILRLATEVNWDEEKECFESLSKECAMFYSIRKQYISEESTLSGQQSEVPGSIPNSWKWTVEHIVYKALRSHILPPKHFTEDGNILQLANLPDLYKVFERC

SEQ ID NO: 339 - protein, 756 aa, Homo sapiens
MSFVAGVIRRLDETVVNRIAAGEVIQRPANAIKEMIENCLDAKSTSIQVIVKEGGLKLIQIQDNGTGIRKEDLDIVCERFTKSKLQSFEDLASISTYGFRGEALASISHVAHVTITTKTADGKCAYRASYSDGKLKAPPKPCAGNQGTQITVEDLFYNIATRRKALKNPSEEYGKILEVVGRYSVHNAGISFSVKKQGETVADVRTLPNASTVDNIRSVFGNAVSRELIEIGCEDKTLAFKMNGYISNANYSVKKCIFLLFINHRLVESTSLRKAIETVYAAYLPKNTHPFLYLSLEISPQNVDVNVHPTKHEVHFLHEESILERVQQHIESKLLGSNSSRMYFTQTLLPGLAGPSGEMVKSTTSLTSSSTSGSSDKVYAHQMVRTDSREQKLDAFLQPLSKPLSSQPQAIVTEDKTDISSGRARQQDEEMLELPAPAEVAAKNQSLEGDTTKGTSEMSEKRGPTSSNPRKRHREDSDVEMVEDDSRKEMTAACTPRRRIINLTSVLSLQEEINEQGHEVLREMLHNHSFVGCVNPQWALAQHQTKLYLLNTTKLSEELFYQILIYDFANFGVLRLSEPAPLFDLAMLALDSPESGWTEEDGPKEGLAEYIVEFLKKKAEMLADYFSLEIDEEGNLIGLPLLIDNYVPPLEGLPIFILRLATEVNWDEEKECFESLSKECAMFYSIRKQYISEESTLSGQQSEVPGSIPNSWKWTVEHIVYKALRSHILPPKHFTEDGNILQLANLPDLYKVFERC

SEQ ID NO: 340 - protein, 756 aa, Homo sapiens
MSFVAGVIRRLDETVVNRIAAGEVIQRPANAIKEMIENCLDAKSTSIQVIVKEGGLKLIQIQDNGTGIRKEDLDIVCERFTMSKLQSFEDLASISTYGFRGEALASISHVAHVTITTKTADGKCAYRASYSDGKLKAPPKPCAGNQGTQITVEDLFYNIATRRKALKNPSEEYGKILEVVGRYSVHNAGISFSVKKQGETVADVRTLPNASTVDNIRSVFGNAVSRELIEIGCEDKTLAFKMNGYISNANYSVKKCIFLLFINHRLVESTSLRKAIETVYAAYLPKNTHPFLYLSLEISPQNVDVNVHPTKHEVHFLHEESILERVQQHIESKLLGSNSSRMYFTQTLLPGLAGPSGEMVKSTTSLTSSSTSGSSDKVYAHQMVRTDSREQKLDAFLQPLSKPLSSQPQAIVTEDKTDISSGRARQQDEEMLELPAPAEVAAKNQSLEGDTTKGTSEMSEKRGPTSSNPRKRHREDSDVEMVEDDSRKEMTAACTPRRRIINLTSVLSLQEEINEQGHEVLREMLHNHSFVGCVNPQWALAQHQTKLYLLNTTKLSEELFYQILIYDFANFGVLRLSEPAPLFDLAMLALDSPESGWTEEDGPKEGLAEYIVEFLKKKAEMLADYFSLEIDEEGNLIGLPLLIDNYVPPLEGLPIFILRLATEVNWDEEKECFESLSKECAMFYSIRKQYISEESTLSGQQSEVPGSIPNSWKWTVEHIVYKALRSHILPPKHFTEDGNILQLANLPDLYKVFERC

SEQ ID NO: 341 - protein, 756 aa, Homo sapiens
MSFVAGVIRRLDETVVNRIAAGEVIQRPANAIKEMIENCLDAKSTSIQVIVKEGGLKLIQIQDNGTGIRKEDLDIVCERFTSSKLQSFEDLASISTYGFRGEALASISHVAHVTITTKTADGKCAYRASYSDGKLKAPPKPCAGNQGTQITVEDLFYNIATRRKALKNPSEEYGKILEVVGRYSVHNAGISFSVKKQGETVADVRTLPNASTVDNIRSVFGNAVSRELIEIGCEDKTLAFKMNGYISNANYSVKKCIFLLFINHRLVESTSLRKAIETVYAAYLPKNTHPFLYLSLEISPQNVDVNVHPTKHEVHFLHEESILERVQQHIESKLLGSNSSRMYFTQTLLPGLAGPSGEMVKSTTSLTSSSTSGSSDKVYAHQMVRTDSREQKLDAFLQPLSKPLSSQPQAIVTEDKTDISSGRARQQDEEMLELPAPAEVAAKNQSLEGDTTKGTSEMSEKRGPTSSNPRKRHREDSDVEMVEDDSRKEMTAACTPRRRIINLTSVLSLQEEINEQGHEVLREMLHNHSFVGCVNPQWALAQHQTKLYLLNTTKLSEELFYQILIYDFANFGVLRLSEPAPLFDLAMLALDSPESGWTEEDGPKEGLAEYIVEFLKKKAEMLADYFSLEIDEEGNLIGLPLLIDNYVPPLEGLPIFILRLATEVNWDEEKECFESLSKECAMFYSIRKQYISEESTLSGQQSEVPGSIPNSWKWTVEHIVYKALRSHILPPKHFTEDGNILQLANLPDLYKVFERC

SEQ ID NO: 342 - protein, 756 aa, Homo sapiens
MSFVAGVIRRLDETVVNRIAAGEVIQRPANAIKEMIENCLDAKSTSIQVIVKEGGLKLIQIQDNGTGIRKEDLDIVCERFTTFKLQSFEDLASISTYGFRGEALASISHVAHVTITTKTADGKCAYRASYSDGKLKAPPKPCAGNQGTQITVEDLFYNIATRRKALKNPSEEYGKILEVVGRYSVHNAGISFSVKKQGETVADVRTLPNASTVDNIRSVFGNAVSRELIEIGCEDKTLAFKMNGYISNANYSVKKCIFLLFINHRLVESTSLRKAIETVYAAYLPKNTHPFLYLSLEISPQNVDVNVHPTKHEVHFLHEESILERVQQHIESKLLGSNSSRMYFTQTLLPGLAGPSGEMVKSTTSLTSSSTSGSSDKVYAHQMVRTDSREQKLDAFLQPLSKPLSSQPQAIVTEDKTDISSGRARQQDEEMLELPAPAEVAAKNQSLEGDTTKGTSEMSEKRGPTSSNPRKRHREDSDVEMVEDDSRKEMTAACTPRRRIINLTSVLSLQEEINEQGHEVLREMLHNHSFVGCVNPQWALAQHQTKLYLLNTTKLSEELFYQILIYDFANFGVLRLSEPAPLFDLAMLALDSPESGWTEEDGPKEGLAEYIVEFLKKKAEMLADYFSLEIDEEGNLIGLPLLIDNYVPPLEGLPIFILRLATEVNWDEEKECFESLSKECAMFYSIRKQYISEESTLSGQQSEVPGSIPNSWKWTVEHIVYKALRSHILPPKHFTEDGNILQLANLPDLYKVFERC

SEQ ID NO: 343 - protein, 756 aa, Homo sapiens
MSFVAGVIRRLDETVVNRIAAGEVIQRPANAIKEMIENCLDAKSTSIQVIVKEGGLKLIQIQDNGTGIRKEDLDIVCERFTTPKLQSFEDLASISTYGFRGEALASISHVAHVTITTKTADGKCAYRASYSDGKLKAPPKPCAGNQGTQITVEDLFYNIATRRKALKNPSEEYGKILEVVGRYSVHNAGISFSVKKQGETVADVRTLPNASTVDNIRSVFGNAVSRELIEIGCEDKTLAFKMNGYISNANYSVKKCIFLLFINHRLVESTSLRKAIETVYAAYLPKNTHPFLYLSLEISPQNVDVNVHPTKHEVHFLHEESILERVQQHIESKLLGSNSSRMYFTQTLLPGLAGPSGEMVKSTTSLTSSSTSGSSDKVYAHQMVRTDSREQKLDAFLQPLSKPLSSQPQAIVTEDKTDISSGRARQQDEEMLELPAPAEVAAKNQSLEGDTTKGTSEMSEKRGPTSSNPRKRHREDSDVEMVEDDSRKEMTAACTPRRRIINLTSVLSLQEEINEQGHEVLREMLHNHSFVGCVNPQWALAQHQTKLYLLNTTKLSEELFYQILIYDFANFGVLRLSEPAPLFDLAMLALDSPESGWTEEDGPKEGLAEYIVEFLKKKAEMLADYFSLEIDEEGNLIGLPLLIDNYVPPLEGLPIFILRLATEVNWDEEKECFESLSKECAMFYSIRKQYISEESTLSGQQSEVPGSIPNSWKWTVEHIVYKALRSHILPPKHFTEDGNILQLANLPDLYKVFERC

SEQ ID NO: 344 - protein, 756 aa, Homo sapiens
MSFVAGVIRRLDETVVNRIAAGEVIQRPANAIKEMIENCLDAKSTSIQVIVKEGGLKLIQIQDNGTGIRKEDLDIVCERFTTSKLQSFGDLASISTYGFRGEALASISHVAHVTITTKTADGKCAYRASYSDGKLKAPPKPCAGNQGTQITVEDLFYNIATRRKALKNPSEEYGKILEVVGRYSVHNAGISFSVKKQGETVADVRTLPNASTVDNIRSVFGNAVSRELIEIGCEDKTLAFKMNGYISNANYSVKKCIFLLFINHRLVESTSLRKAIETVYAAYLPKNTHPFLYLSLEISPQNVDVNVHPTKHEVHFLHEESILERVQQHIESKLLGSNSSRMYFTQTLLPGLAGPSGEMVKSTTSLTSSSTSGSSDKVYAHQMVRTDSREQKLDAFLQPLSKPLSSQPQAIVTEDKTDISSGRARQQDEEMLELPAPAEVAAKNQSLEGDTTKGTSEMSEKRGPTSSNPRKRHREDSDVEMVEDDSRKEMTAACTPRRRIINLTSVLSLQEEINEQGHEVLREMLHNHSFVGCVNPQWALAQHQTKLYLLNTTKLSEELFYQILIYDFANFGVLRLSEPAPLFDLAMLALDSPESGWTEEDGPKEGLAEYIVEFLKKKAEMLADYFSLEIDEEGNLIGLPLLIDNYVPPLEGLPIFILRLATEVNWDEEKECFESLSKECAMFYSIRKQYISEESTLSGQQSEVPGSIPNSWKWTVEHIVYKALRSHILPPKHFTEDGNILQLANLPDLYKVFERC

SEQ ID NO: 345 - protein, 756 aa, Homo sapiens
MSFVAGVIRRLDETVVNRIAAGEVIQRPANAIKEMIENCLDAKSTSIQVIVKEGGLKLIQIQDNGTGIRKEDLDIVCERFTTSKLQSFVDLASISTYGFRGEALASISHVAHVTITTKTADGKCAYRASYSDGKLKAPPKPCAGNQGTQITVEDLFYNIATRRKALKNPSEEYGKILEVVGRYSVHNAGISFSVKKQGETVADVRTLPNASTVDNIRSVFGNAVSRELIEIGCEDKTLAFKMNGYISNANYSVKKCIFLLFINHRLVESTSLRKAIETVYAAYLPKNTHPFLYLSLEISPQNVDVNVHPTKHEVHFLHEESILERVQQHIESKLLGSNSSRMYFTQTLLPGLAGPSGEMVKSTTSLTSSSTSGSSDKVYAHQMVRTDSREQKLDAFLQPLSKPLSSQPQAIVTEDKTDISSGRARQQDEEMLELPAPAEVAAKNQSLEGDTTKGTSEMSEKRGPTSSNPRKRHREDSDVEMVEDDSRKEMTAACTPRRRIINLTSVLSLQEEINEQGHEVLREMLHNHSFVGCVNPQWALAQHQTKLYLLNTTKLSEELFYQILIYDFANFGVLRLSEPAPLFDLAMLALDSPESGWTEEDGPKEGLAEYIVEFLKKKAEMLADYFSLEIDEEGNLIGLPLLIDNYVPPLEGLPIFILRLATEVNWDEEKECFESLSKECAMFYSIRKQYISEESTLSGQQSEVPGSIPNSWKWTVEHIVYKALRSHILPPKHFTEDGNILQLANLPDLYKVFERC

SEQ ID NO: 346 - protein, 756 aa, Homo sapiens
MSFVAGVIRRLDETVVNRIAAGEVIQRPANAIKEMIENCLDAKSTSIQVIVKEGGLKLIQIQDNGTGIRKEDLDIVCERFTTSKLQSFEDVASISTYGFRGEALASISHVAHVTITTKTADGKCAYRASYSDGKLKAPPKPCAGNQGTQITVEDLFYNIATRRKALKNPSEEYGKILEVVGRYSVHNAGISFSVKKQGETVADVRTLPNASTVDNIRSVFGNAVSRELIEIGCEDKTLAFKMNGYISNANYSVKKCIFLLFINHRLVESTSLRKAIETVYAAYLPKNTHPFLYLSLEISPQNVDVNVHPTKHEVHFLHEESILERVQQHIESKLLGSNSSRMYFTQTLLPGLAGPSGEMVKSTTSLTSSSTSGSSDKVYAHQMVRTDSREQKLDAFLQPLSKPLSSQPQAIVTEDKTDISSGRARQQDEEMLELPAPAEVAAKNQSLEGDTTKGTSEMSEKRGPTSSNPRKRHREDSDVEMVEDDSRKEMTAACTPRRRIINLTSVLSLQEEINEQGHEVLREMLHNHSFVGCVNPQWALAQHQTKLYLLNTTKLSEELFYQILIYDFANFGVLRLSEPAPLFDLAMLALDSPESGWTEEDGPKEGLAEYIVEFLKKKAEMLADYFSLEIDEEGNLIGLPLLIDNYVPPLEGLPIFILRLATEVNWDEEKECFESLSKECAMFYSIRKQYISEESTLSGQQSEVPGSIPNSWKWTVEHIVYKALRSHILPPKHFTEDGNILQLANLPDLYKVFERC

SEQ ID NO: 347 - protein, 756 aa, Homo sapiens
MSFVAGVIRRLDETVVNRIAAGEVIQRPANAIKEMIENCLDAKSTSIQVIVKEGGLKLIQIQDNGTGIRKEDLDIVCERFTTSKLQSFEDLASISTYGIRGEALASISHVAHVTITTKTADGKCAYRASYSDGKLKAPPKPCAGNQGTQITVEDLFYNIATRRKALKNPSEEYGKILEVVGRYSVHNAGISFSVKKQGETVADVRTLPNASTVDNIRSVFGNAVSRELIEIGCEDKTLAFKMNGYISNANYSVKKCIFLLFINHRLVESTSLRKAIETVYAAYLPKNTHPFLYLSLEISPQNVDVNVHPTKHEVHFLHEESILERVQQHIESKLLGSNSSRMYFTQTLLPGLAGPSGEMVKSTTSLTSSSTSGSSDKVYAHQMVRTDSREQKLDAFLQPLSKPLSSQPQAIVTEDKTDISSGRARQQDEEMLELPAPAEVAAKNQSLEGDTTKGTSEMSEKRGPTSSNPRKRHREDSDVEMVEDDSRKEMTAACTPRRRIINLTSVLSLQEEINEQGHEVLREMLHNHSFVGCVNPQWALAQHQTKLYLLNTTKLSEELFYQILIYDFANFGVLRLSEPAPLFDLAMLALDSPESGWTEEDGPKEGLAEYIVEFLKKKAEMLADYFSLEIDEEGNLIGLPLLIDNYVPPLEGLPIFILRLATEVNWDEEKECFESLSKECAMFYSIRKQYISEESTLSGQQSEVPGSIPNSWKWTVEHIVYKALRSHILPPKHFTEDGNILQLANLPDLYKVFERC

SEQ ID NO: 348 - protein, 756 aa, Homo sapiens
MSFVAGVIRRLDETVVNRIAAGEVIQRPANAIKEMIENCLDAKSTSIQVIVKEGGLKLIQIQDNGTGIRKEDLDIVCERFTTSKLQSFEDLASISTYGLRGEALASISHVAHVTITTKTADGKCAYRASYSDGKLKAPPKPCAGNQGTQITVEDLFYNIATRRKALKNPSEEYGKILEVVGRYSVHNAGISFSVKKQGETVADVRTLPNASTVDNIRSVFGNAVSRELIEIGCEDKTLAFKMNGYISNANYSVKKCIFLLFINHRLVESTSLRKAIETVYAAYLPKNTHPFLYLSLEISPQNVDVNVHPTKHEVHFLHEESILERVQQHIESKLLGSNSSRMYFTQTLLPGLAGPSGEMVKSTTSLTSSSTSGSSDKVYAHQMVRTDSREQKLDAFLQPLSKPLSSQPQAIVTEDKTDISSGRARQQDEEMLELPAPAEVAAKNQSLEGDTTKGTSEMSEKRGPTSSNPRKRHREDSDVEMVEDDSRKEMTAACTPRRRIINLTSVLSLQEEINEQGHEVLREMLHNHSFVGCVNPQWALAQHQTKLYLLNTTKLSEELFYQILIYDFANFGVLRLSEPAPLFDLAMLALDSPESGWTEEDGPKEGLAEYIVEFLKKKAEMLADYFSLEIDEEGNLIGLPLLIDNYVPPLEGLPIFILRLATEVNWDEEKECFESLSKECAMFYSIRKQYISEESTLSGQQSEVPGSIPNSWKWTVEHIVYKALRSHILPPKHFTEDGNILQLANLPDLYKVFERC

SEQ ID NO: 349 - protein, 756 aa, Homo sapiens
MSFVAGVIRRLDETVVNRIAAGEVIQRPANAIKEMIENCLDAKSTSIQVIVKEGGLKLIQIQDNGTGIRKEDLDIVCERFTTSKLQSFEDLASISTYGFPGEALASISHVAHVTITTKTADGKCAYRASYSDGKLKAPPKPCAGNQGTQITVEDLFYNIATRRKALKNPSEEYGKILEVVGRYSVHNAGISFSVKKQGETVADVRTLPNASTVDNIRSVFGNAVSRELIEIGCEDKTLAFKMNGYISNANYSVKKCIFLLFINHRLVESTSLRKAIETVYAAYLPKNTHPFLYLSLEISPQNVDVNVHPTKHEVHFLHEESILERVQQHIESKLLGSNSSRMYFTQTLLPGLAGPSGEMVKSTTSLTSSSTSGSSDKVYAHQMVRTDSREQKLDAFLQPLSKPLSSQPQAIVTEDKTDISSGRARQQDEEMLELPAPAEVAAKNQSLEGDTTKGTSEMSEKRGPTSSNPRKRHREDSDVEMVEDDSRKEMTAACTPRRRIINLTSVLSLQEEINEQGHEVLREMLHNHSFVGCVNPQWALAQHQTKLYLLNTTKLSEELFYQILIYDFANFGVLRLSEPAPLFDLAMLALDSPESGWTEEDGPKEGLAEYIVEFLKKKAEMLADYFSLEIDEEGNLIGLPLLIDNYVPPLEGLPIFILRLATEVNWDEEKECFESLSKECAMFYSIRKQYISEESTLSGQQSEVPGSIPNSWKWTVEHIVYKALRSHILPPKHFTEDGNILQLANLPDLYKVFERC

SEQ ID NO: 350 - protein, 756 aa, Homo sapiens
MSFVAGVIRRLDETVVNRIAAGEVIQRPANAIKEMIENCLDAKSTSIQVIVKEGGLKLIQIQDNGTGIRKEDLDIVCERFTTSKLQSFEDLASISTYGFQGEALASISHVAHVTITTKTADGKCAYRASYSDGKLKAPPKPCAGNQGTQITVEDLFYNIATRRKALKNPSEEYGKILEVVGRYSVHNAGISFSVKKQGETVADVRTLPNASTVDNIRSVFGNAVSRELIEIGCEDKTLAFKMNGYISNANYSVKKCIFLLFINHRLVESTSLRKAIETVYAAYLPKNTHPFLYLSLEISPQNVDVNVHPTKHEVHFLHEESILERVQQHIESKLLGSNSSRMYFTQTLLPGLAGPSGEMVKSTTSLTSSSTSGSSDKVYAHQMVRTDSREQKLDAFLQPLSKPLSSQPQAIVTEDKTDISSGRARQQDEEMLELPAPAEVAAKNQSLEGDTTKGTSEMSEKRGPTSSNPRKRHREDSDVEMVEDDSRKEMTAACTPRRRIINLTSVLSLQEEINEQGHEVLREMLHNHSFVGCVNPQWALAQHQTKLYLLNTTKLSEELFYQILIYDFANFGVLRLSEPAPLFDLAMLALDSPESGWTEEDGPKEGLAEYIVEFLKKKAEMLADYFSLEIDEEGNLIGLPLLIDNYVPPLEGLPIFILRLATEVNWDEEKECFESLSKECAMFYSIRKQYISEESTLSGQQSEVPGSIPNSWKWTVEHIVYKALRSHILPPKHFTEDGNILQLANLPDLYKVFERC

SEQ ID NO: 351 - protein, 756 aa, Homo sapiens
MSFVAGVIRRLDETVVNRIAAGEVIQRPANAIKEMIENCLDAKSTSIQVIVKEGGLKLIQIQDNGTGIRKEDLDIVCERFTTSKLQSFEDLASISTYGFRDEALASISHVAHVTITTKTADGKCAYRASYSDGKLKAPPKPCAGNQGTQITVEDLFYNIATRRKALKNPSEEYGKILEVVGRYSVHNAGISFSVKKQGETVADVRTLPNASTVDNIRSVFGNAVSRELIEIGCEDKTLAFKMNGYISNANYSVKKCIFLLFINHRLVESTSLRKAIETVYAAYLPKNTHPFLYLSLEISPQNVDVNVHPTKHEVHFLHEESILERVQQHIESKLLGSNSSRMYFTQTLLPGLAGPSGEMVKSTTSLTSSSTSGSSDKVYAHQMVRTDSREQKLDAFLQPLSKPLSSQPQAIVTEDKTDISSGRARQQDEEMLELPAPAEVAAKNQSLEGDTTKGTSEMSEKRGPTSSNPRKRHREDSDVEMVEDDSRKEMTAACTPRRRIINLTSVLSLQEEINEQGHEVLREMLHNHSFVGCVNPQWALAQHQTKLYLLNTTKLSEELFYQILIYDFANFGVLRLSEPAPLFDLAMLALDSPESGWTEEDGPKEGLAEYIVEFLKKKAEMLADYFSLEIDEEGNLIGLPLLIDNYVPPLEGLPIFILRLATEVNWDEEKECFESLSKECAMFYSIRKQYISEESTLSGQQSEVPGSIPNSWKWTVEHIVYKALRSHILPPKHFTEDGNILQLANLPDLYKVFERC

SEQ ID NO: 352 - protein, 756 aa, Homo sapiens
MSFVAGVIRRLDETVVNRIAAGEVIQRPANAIKEMIENCLDAKSTSIQVIVKEGGLKLIQIQDNGTGIRKEDLDIVCERFTTSKLQSFEDLASISTYGFRGDALASISHVAHVTITTKTADGKCAYRASYSDGKLKAPPKPCAGNQGTQITVEDLFYNIATRRKALKNPSEEYGKILEVVGRYSVHNAGISFSVKKQGETVADVRTLPNASTVDNIRSVFGNAVSRELIEIGCEDKTLAFKMNGYISNANYSVKKCIFLLFINHRLVESTSLRKAIETVYAAYLPKNTHPFLYLSLEISPQNVDVNVHPTKHEVHFLHEESILERVQQHIESKLLGSNSSRMYFTQTLLPGLAGPSGEMVKSTTSLTSSSTSGSSDKVYAHQMVRTDSREQKLDAFLQPLSKPLSSQPQAIVTEDKTDISSGRARQQDEEMLELPAPAEVAAKNQSLEGDTTKGTSEMSEKRGPTSSNPRKRHREDSDVEMVEDDSRKEMTAACTPRRRIINLTSVLSLQEEINEQGHEVLREMLHNHSFVGCVNPQWALAQHQTKLYLLNTTKLSEELFYQILIYDFANFGVLRLSEPAPLFDLAMLALDSPESGWTEEDGPKEGLAEYIVEFLKKKAEMLADYFSLEIDEEGNLIGLPLLIDNYVPPLEGLPIFILRLATEVNWDEEKECFESLSKECAMFYSIRKQYISEESTLSGQQSEVPGSIPNSWKWTVEHIVYKALRSHILPPKHFTEDGNILQLANLPDLYKVFERC

SEQ ID NO: 353 - protein, 756 aa, Homo sapiens
MSFVAGVIRRLDETVVNRIAAGEVIQRPANAIKEMIENCLDAKSTSIQVIVKEGGLKLIQIQDNGTGIRKEDLDIVCERFTTSKLQSFEDLASISTYGFRGGALASISHVAHVTITTKTADGKCAYRASYSDGKLKAPPKPCAGNQGTQITVEDLFYNIATRRKALKNPSEEYGKILEVVGRYSVHNAGISFSVKKQGETVADVRTLPNASTVDNIRSVFGNAVSRELIEIGCEDKTLAFKMNGYISNANYSVKKCIFLLFINHRLVESTSLRKAIETVYAAYLPKNTHPFLYLSLEISPQNVDVNVHPTKHEVHFLHEESILERVQQHIESKLLGSNSSRMYFTQTLLPGLAGPSGEMVKSTTSLTSSSTSGSSDKVYAHQMVRTDSREQKLDAFLQPLSKPLSSQPQAIVTEDKTDISSGRARQQDEEMLELPAPAEVAAKNQSLEGDTTKGTSEMSEKRGPTSSNPRKRHREDSDVEMVEDDSRKEMTAACTPRRRIINLTSVLSLQEEINEQGHEVLREMLHNHSFVGCVNPQWALAQHQTKLYLLNTTKLSEELFYQILIYDFANFGVLRLSEPAPLFDLAMLALDSPESGWTEEDGPKEGLAEYIVEFLKKKAEMLADYFSLEIDEEGNLIGLPLLIDNYVPPLEGLPIFILRLATEVNWDEEKECFESLSKECAMFYSIRKQYISEESTLSGQQSEVPGSIPNSWKWTVEHIVYKALRSHILPPKHFTEDGNILQLANLPDLYKVFERC

SEQ ID NO: 354 - protein, 756 aa, Homo sapiens
MSFVAGVIRRLDETVVNRIAAGEVIQRPANAIKEMIENCLDAKSTSIQVIVKEGGLKLIQIQDNGTGIRKEDLDIVCERFTTSKLQSFEDLASISTYGFRGETLASISHVAHVTITTKTADGKCAYRASYSDGKLKAPPKPCAGNQGTQITVEDLFYNIATRRKALKNPSEEYGKILEVVGRYSVHNAGISFSVKKQGETVADVRTLPNASTVDNIRSVFGNAVSRELIEIGCEDKTLAFKMNGYISNANYSVKKCIFLLFINHRLVESTSLRKAIETVYAAYLPKNTHPFLYLSLEISPQNVDVNVHPTKHEVHFLHEESILERVQQHIESKLLGSNSSRMYFTQTLLPGLAGPSGEMVKSTTSLTSSSTSGSSDKVYAHQMVRTDSREQKLDAFLQPLSKPLSSQPQAIVTEDKTDISSGRARQQDEEMLELPAPAEVAAKNQSLEGDTTKGTSEMSEKRGPTSSNPRKRHREDSDVEMVEDDSRKEMTAACTPRRRIINLTSVLSLQEEINEQGHEVLREMLHNHSFVGCVNPQWALAQHQTKLYLLNTTKLSEELFYQILIYDFANFGVLRLSEPAPLFDLAMLALDSPESGWTEEDGPKEGLAEYIVEFLKKKAEMLADYFSLEIDEEGNLIGLPLLIDNYVPPLEGLPIFILRLATEVNWDEEKECFESLSKECAMFYSIRKQYISEESTLSGQQSEVPGSIPNSWKWTVEHIVYKALRSHILPPKHFTEDGNILQLANLPDLYKVFERC

SEQ ID NO: 355 - protein, 756 aa, Homo sapiens
MSFVAGVIRRLDETVVNRIAAGEVIQRPANAIKEMIENCLDAKSTSIQVIVKEGGLKLIQIQDNGTGIRKEDLDIVCERFTTSKLQSFEDLASISTYGFRGEVLASISHVAHVTITTKTADGKCAYRASYSDGKLKAPPKPCAGNQGTQITVEDLFYNIATRRKALKNPSEEYGKILEVVGRYSVHNAGISFSVKKQGETVADVRTLPNASTVDNIRSVFGNAVSRELIEIGCEDKTLAFKMNGYISNANYSVKKCIFLLFINHRLVESTSLRKAIETVYAAYLPKNTHPFLYLSLEISPQNVDVNVHPTKHEVHFLHEESILERVQQHIESKLLGSNSSRMYFTQTLLPGLAGPSGEMVKSTTSLTSSSTSGSSDKVYAHQMVRTDSREQKLDAFLQPLSKPLSSQPQAIVTEDKTDISSGRARQQDEEMLELPAPAEVAAKNQSLEGDTTKGTSEMSEKRGPTSSNPRKRHREDSDVEMVEDDSRKEMTAACTPRRRIINLTSVLSLQEEINEQGHEVLREMLHNHSFVGCVNPQWALAQHQTKLYLLNTTKLSEELFYQILIYDFANFGVLRLSEPAPLFDLAMLALDSPESGWTEEDGPKEGLAEYIVEFLKKKAEMLADYFSLEIDEEGNLIGLPLLIDNYVPPLEGLPIFILRLATEVNWDEEKECFESLSKECAMFYSIRKQYISEESTLSGQQSEVPGSIPNSWKWTVEHIVYKALRSHILPPKHFTEDGNILQLANLPDLYKVFERC

SEQ ID NO: 356 - protein, 756 aa, Homo sapiens
MSFVAGVIRRLDETVVNRIAAGEVIQRPANAIKEMIENCLDAKSTSIQVIVKEGGLKLIQIQDNGTGIRKEDLDIVCERFTTSKLQSFEDLASISTYGFRGEALASISHVPHVTITTKTADGKCAYRASYSDGKLKAPPKPCAGNQGTQITVEDLFYNIATRRKALKNPSEEYGKILEVVGRYSVHNAGISFSVKKQGETVADVRTLPNASTVDNIRSVFGNAVSRELIEIGCEDKTLAFKMNGYISNANYSVKKCIFLLFINHRLVESTSLRKAIETVYAAYLPKNTHPFLYLSLEISPQNVDVNVHPTKHEVHFLHEESILERVQQHIESKLLGSNSSRMYFTQTLLPGLAGPSGEMVKSTTSLTSSSTSGSSDKVYAHQMVRTDSREQKLDAFLQPLSKPLSSQPQAIVTEDKTDISSGRARQQDEEMLELPAPAEVAAKNQSLEGDTTKGTSEMSEKRGPTSSNPRKRHREDSDVEMVEDDSRKEMTAACTPRRRIINLTSVLSLQEEINEQGHEVLREMLHNHSFVGCVNPQWALAQHQTKLYLLNTTKLSEELFYQILIYDFANFGVLRLSEPAPLFDLAMLALDSPESGWTEEDGPKEGLAEYIVEFLKKKAEMLADYFSLEIDEEGNLIGLPLLIDNYVPPLEGLPIFILRLATEVNWDEEKECFESLSKECAMFYSIRKQYISEESTLSGQQSEVPGSIPNSWKWTVEHIVYKALRSHILPPKHFTEDGNILQLANLPDLYKVFERC

SEQ ID NO: 357 - protein, 756 aa, Homo sapiens
MSFVAGVIRRLDETVVNRIAAGEVIQRPANAIKEMIENCLDAKSTSIQVIVKEGGLKLIQIQDNGTGIRKEDLDIVCERFTTSKLQSFEDLASISTYGFRGEALASISHVTHVTITTKTADGKCAYRASYSDGKLKAPPKPCAGNQGTQITVEDLFYNIATRRKALKNPSEEYGKILEVVGRYSVHNAGISFSVKKQGETVADVRTLPNASTVDNIRSVFGNAVSRELIEIGCEDKTLAFKMNGYISNANYSVKKCIFLLFINHRLVESTSLRKAIETVYAAYLPKNTHPFLYLSLEISPQNVDVNVHPTKHEVHFLHEESILERVQQHIESKLLGSNSSRMYFTQTLLPGLAGPSGEMVKSTTSLTSSSTSGSSDKVYAHQMVRTDSREQKLDAFLQPLSKPLSSQPQAIVTEDKTDISSGRARQQDEEMLELPAPAEVAAKNQSLEGDTTKGTSEMSEKRGPTSSNPRKRHREDSDVEMVEDDSRKEMTAACTPRRRIINLTSVLSLQEEINEQGHEVLREMLHNHSFVGCVNPQWALAQHQTKLYLLNTTKLSEELFYQILIYDFANFGVLRLSEPAPLFDLAMLALDSPESGWTEEDGPKEGLAEYIVEFLKKKAEMLADYFSLEIDEEGNLIGLPLLIDNYVPPLEGLPIFILRLATEVNWDEEKECFESLSKECAMFYSIRKQYISEESTLSGQQSEVPGSIPNSWKWTVEHIVYKALRSHILPPKHFTEDGNILQLANLPDLYKVFERC

SEQ ID NO: 358 - protein, 756 aa, Homo sapiens
MSFVAGVIRRLDETVVNRIAAGEVIQRPANAIKEMIENCLDAKSTSIQVIVKEGGLKLIQIQDNGTGIRKEDLDIVCERFTTSKLQSFEDLASISTYGFRGEALASISHVAHATITTKTADGKCAYRASYSDGKLKAPPKPCAGNQGTQITVEDLFYNIATRRKALKNPSEEYGKILEVVGRYSVHNAGISFSVKKQGETVADVRTLPNASTVDNIRSVFGNAVSRELIEIGCEDKTLAFKMNGYISNANYSVKKCIFLLFINHRLVESTSLRKAIETVYAAYLPKNTHPFLYLSLEISPQNVDVNVHPTKHEVHFLHEESILERVQQHIESKLLGSNSSRMYFTQTLLPGLAGPSGEMVKSTTSLTSSSTSGSSDKVYAHQMVRTDSREQKLDAFLQPLSKPLSSQPQAIVTEDKTDISSGRARQQDEEMLELPAPAEVAAKNQSLEGDTTKGTSEMSEKRGPTSSNPRKRHREDSDVEMVEDDSRKEMTAACTPRRRIINLTSVLSLQEEINEQGHEVLREMLHNHSFVGCVNPQWALAQHQTKLYLLNTTKLSEELFYQILIYDFANFGVLRLSEPAPLFDLAMLALDSPESGWTEEDGPKEGLAEYIVEFLKKKAEMLADYFSLEIDEEGNLIGLPLLIDNYVPPLEGLPIFILRLATEVNWDEEKECFESLSKECAMFYSIRKQYISEESTLSGQQSEVPGSIPNSWKWTVEHIVYKALRSHILPPKHFTEDGNILQLANLPDLYKVFERC

SEQ ID NO: 359 - protein, 756 aa, Homo sapiens
MSFVAGVIRRLDETVVNRIAAGEVIQRPANAIKEMIENCLDAKSTSIQVIVKEGGLKLIQIQDNGTGIRKEDLDIVCERFTTSKLQSFEDLASISTYGFRGEALASISHVAHVIITTKTADGKCAYRASYSDGKLKAPPKPCAGNQGTQITVEDLFYNIATRRKALKNPSEEYGKILEVVGRYSVHNAGISFSVKKQGETVADVRTLPNASTVDNIRSVFGNAVSRELIEIGCEDKTLAFKMNGYISNANYSVKKCIFLLFINHRLVESTSLRKAIETVYAAYLPKNTHPFLYLSLEISPQNVDVNVHPTKHEVHFLHEESILERVQQHIESKLLGSNSSRMYFTQTLLPGLAGPSGEMVKSTTSLTSSSTSGSSDKVYAHQMVRTDSREQKLDAFLQPLSKPLSSQPQAIVTEDKTDISSGRARQQDEEMLELPAPAEVAAKNQSLEGDTTKGTSEMSEKRGPTSSNPRKRHREDSDVEMVEDDSRKEMTAACTPRRRIINLTSVLSLQEEINEQGHEVLREMLHNHSFVGCVNPQWALAQHQTKLYLLNTTKLSEELFYQILIYDFANFGVLRLSEPAPLFDLAMLALDSPESGWTEEDGPKEGLAEYIVEFLKKKAEMLADYFSLEIDEEGNLIGLPLLIDNYVPPLEGLPIFILRLATEVNWDEEKECFESLSKECAMFYSIRKQYISEESTLSGQQSEVPGSIPNSWKWTVEHIVYKALRSHILPPKHFTEDGNILQLANLPDLYKVFERC

SEQ ID NO: 360 - protein, 756 aa, Homo sapiens
MSFVAGVIRRLDETVVNRIAAGEVIQRPANAIKEMIENCLDAKSTSIQVIVKEGGLKLIQIQDNGTGIRKEDLDIVCERFTTSKLQSFEDLASISTYGFRGEALASISHVAHVTETTKTADGKCAYRASYSDGKLKAPPKPCAGNQGTQITVEDLFYNIATRRKALKNPSEEYGKILEVVGRYSVHNAGISFSVKKQGETVADVRTLPNASTVDNIRSVFGNAVSRELIEIGCEDKTLAFKMNGYISNANYSVKKCIFLLFINHRLVESTSLRKAIETVYAAYLPKNTHPFLYLSLEISPQNVDVNVHPTKHEVHFLHEESILERVQQHIESKLLGSNSSRMYFTQTLLPGLAGPSGEMVKSTTSLTSSSTSGSSDKVYAHQMVRTDSREQKLDAFLQPLSKPLSSQPQAIVTEDKTDISSGRARQQDEEMLELPAPAEVAAKNQSLEGDTTKGTSEMSEKRGPTSSNPRKRHREDSDVEMVEDDSRKEMTAACTPRRRIINLTSVLSLQEEINEQGHEVLREMLHNHSFVGCVNPQWALAQHQTKLYLLNTTKLSEELFYQILIYDFANFGVLRLSEPAPLFDLAMLALDSPESGWTEEDGPKEGLAEYIVEFLKKKAEMLADYFSLEIDEEGNLIGLPLLIDNYVPPLEGLPIFILRLATEVNWDEEKECFESLSKECAMFYSIRKQYISEESTLSGQQSEVPGSIPNSWKWTVEHIVYKALRSHILPPKHFTEDGNILQLANLPDLYKVFERC

SEQ ID NO: 361 - protein, 756 aa, Homo sapiens
MSFVAGVIRRLDETVVNRIAAGEVIQRPANAIKEMIENCLDAKSTSIQVIVKEGGLKLIQIQDNGTGIRKEDLDIVCERFTTSKLQSFEDLASISTYGFRGEALASISHVAHVTFTTKTADGKCAYRASYSDGKLKAPPKPCAGNQGTQITVEDLFYNIATRRKALKNPSEEYGKILEVVGRYSVHNAGISFSVKKQGETVADVRTLPNASTVDNIRSVFGNAVSRELIEIGCEDKTLAFKMNGYISNANYSVKKCIFLLFINHRLVESTSLRKAIETVYAAYLPKNTHPFLYLSLEISPQNVDVNVHPTKHEVHFLHEESILERVQQHIESKLLGSNSSRMYFTQTLLPGLAGPSGEMVKSTTSLTSSSTSGSSDKVYAHQMVRTDSREQKLDAFLQPLSKPLSSQPQAIVTEDKTDISSGRARQQDEEMLELPAPAEVAAKNQSLEGDTTKGTSEMSEKRGPTSSNPRKRHREDSDVEMVEDDSRKEMTAACTPRRRIINLTSVLSLQEEINEQGHEVLREMLHNHSFVGCVNPQWALAQHQTKLYLLNTTKLSEELFYQILIYDFANFGVLRLSEPAPLFDLAMLALDSPESGWTEEDGPKEGLAEYIVEFLKKKAEMLADYFSLEIDEEGNLIGLPLLIDNYVPPLEGLPIFILRLATEVNWDEEKECFESLSKECAMFYSIRKQYISEESTLSGQQSEVPGSIPNSWKWTVEHIVYKALRSHILPPKHFTEDGNILQLANLPDLYKVFERC

SEQ ID NO: 362 - protein, 756 aa, Homo sapiens
MSFVAGVIRRLDETVVNRIAAGEVIQRPANAIKEMIENCLDAKSTSIQVIVKEGGLKLIQIQDNGTGIRKEDLDIVCERFTTSKLQSFEDLASISTYGFRGEALASISHVAHVTNTTKTADGKCAYRASYSDGKLKAPPKPCAGNQGTQITVEDLFYNIATRRKALKNPSEEYGKILEVVGRYSVHNAGISFSVKKQGETVADVRTLPNASTVDNIRSVFGNAVSRELIEIGCEDKTLAFKMNGYISNANYSVKKCIFLLFINHRLVESTSLRKAIETVYAAYLPKNTHPFLYLSLEISPQNVDVNVHPTKHEVHFLHEESILERVQQHIESKLLGSNSSRMYFTQTLLPGLAGPSGEMVKSTTSLTSSSTSGSSDKVYAHQMVRTDSREQKLDAFLQPLSKPLSSQPQAIVTEDKTDISSGRARQQDEEMLELPAPAEVAAKNQSLEGDTTKGTSEMSEKRGPTSSNPRKRHREDSDVEMVEDDSRKEMTAACTPRRRIINLTSVLSLQEEINEQGHEVLREMLHNHSFVGCVNPQWALAQHQTKLYLLNTTKLSEELFYQILIYDFANFGVLRLSEPAPLFDLAMLALDSPESGWTEEDGPKEGLAEYIVEFLKKKAEMLADYFSLEIDEEGNLIGLPLLIDNYVPPLEGLPIFILRLATEVNWDEEKECFESLSKECAMFYSIRKQYISEESTLSGQQSEVPGSIPNSWKWTVEHIVYKALRSHILPPKHFTEDGNILQLANLPDLYKVFERC

SEQ ID NO: 363 - protein, 756 aa, Homo sapiens
MSFVAGVIRRLDETVVNRIAAGEVIQRPANAIKEMIENCLDAKSTSIQVIVKEGGLKLIQIQDNGTGIRKEDLDIVCERFTTSKLQSFEDLASISTYGFRGEALASISHVAHVTSTTKTADGKCAYRASYSDGKLKAPPKPCAGNQGTQITVEDLFYNIATRRKALKNPSEEYGKILEVVGRYSVHNAGISFSVKKQGETVADVRTLPNASTVDNIRSVFGNAVSRELIEIGCEDKTLAFKMNGYISNANYSVKKCIFLLFINHRLVESTSLRKAIETVYAAYLPKNTHPFLYLSLEISPQNVDVNVHPTKHEVHFLHEESILERVQQHIESKLLGSNSSRMYFTQTLLPGLAGPSGEMVKSTTSLTSSSTSGSSDKVYAHQMVRTDSREQKLDAFLQPLSKPLSSQPQAIVTEDKTDISSGRARQQDEEMLELPAPAEVAAKNQSLEGDTTKGTSEMSEKRGPTSSNPRKRHREDSDVEMVEDDSRKEMTAACTPRRRIINLTSVLSLQEEINEQGHEVLREMLHNHSFVGCVNPQWALAQHQTKLYLLNTTKLSEELFYQILIYDFANFGVLRLSEPAPLFDLAMLALDSPESGWTEEDGPKEGLAEYIVEFLKKKAEMLADYFSLEIDEEGNLIGLPLLIDNYVPPLEGLPIFILRLATEVNWDEEKECFESLSKECAMFYSIRKQYISEESTLSGQQSEVPGSIPNSWKWTVEHIVYKALRSHILPPKHFTEDGNILQLANLPDLYKVFERC

SEQ ID NO: 364 - protein, 756 aa, Homo sapiens
MSFVAGVIRRLDETVVNRIAAGEVIQRPANAIKEMIENCLDAKSTSIQVIVKEGGLKLIQIQDNGTGIRKEDLDIVCERFTTSKLQSFEDLASISTYGFRGEALASISHVAHVTIATKTADGKCAYRASYSDGKLKAPPKPCAGNQGTQITVEDLFYNIATRRKALKNPSEEYGKILEVVGRYSVHNAGISFSVKKQGETVADVRTLPNASTVDNIRSVFGNAVSRELIEIGCEDKTLAFKMNGYISNANYSVKKCIFLLFINHRLVESTSLRKAIETVYAAYLPKNTHPFLYLSLEISPQNVDVNVHPTKHEVHFLHEESILERVQQHIESKLLGSNSSRMYFTQTLLPGLAGPSGEMVKSTTSLTSSSTSGSSDKVYAHQMVRTDSREQKLDAFLQPLSKPLSSQPQAIVTEDKTDISSGRARQQDEEMLELPAPAEVAAKNQSLEGDTTKGTSEMSEKRGPTSSNPRKRHREDSDVEMVEDDSRKEMTAACTPRRRIINLTSVLSLQEEINEQGHEVLREMLHNHSFVGCVNPQWALAQHQTKLYLLNTTKLSEELFYQILIYDFANFGVLRLSEPAPLFDLAMLALDSPESGWTEEDGPKEGLAEYIVEFLKKKAEMLADYFSLEIDEEGNLIGLPLLIDNYVPPLEGLPIFILRLATEVNWDEEKECFESLSKECAMFYSIRKQYISEESTLSGQQSEVPGSIPNSWKWTVEHIVYKALRSHILPPKHFTEDGNILQLANLPDLYKVFERC

SEQ ID NO: 365 - protein, 756 aa, Homo sapiens
MSFVAGVIRRLDETVVNRIAAGEVIQRPANAIKEMIENCLDAKSTSIQVIVKEGGLKLIQIQDNGTGIRKEDLDIVCERFTTSKLQSFEDLASISTYGFRGEALASISHVAHVTITTNTADGKCAYRASYSDGKLKAPPKPCAGNQGTQITVEDLFYNIATRRKALKNPSEEYGKILEVVGRYSVHNAGISFSVKKQGETVADVRTLPNASTVDNIRSVFGNAVSRELIEIGCEDKTLAFKMNGYISNANYSVKKCIFLLFINHRLVESTSLRKAIETVYAAYLPKNTHPFLYLSLEISPQNVDVNVHPTKHEVHFLHEESILERVQQHIESKLLGSNSSRMYFTQTLLPGLAGPSGEMVKSTTSLTSSSTSGSSDKVYAHQMVRTDSREQKLDAFLQPLSKPLSSQPQAIVTEDKTDISSGRARQQDEEMLELPAPAEVAAKNQSLEGDTTKGTSEMSEKRGPTSSNPRKRHREDSDVEMVEDDSRKEMTAACTPRRRIINLTSVLSLQEEINEQGHEVLREMLHNHSFVGCVNPQWALAQHQTKLYLLNTTKLSEELFYQILIYDFANFGVLRLSEPAPLFDLAMLALDSPESGWTEEDGPKEGLAEYIVEFLKKKAEMLADYFSLEIDEEGNLIGLPLLIDNYVPPLEGLPIFILRLATEVNWDEEKECFESLSKECAMFYSIRKQYISEESTLSGQQSEVPGSIPNSWKWTVEHIVYKALRSHILPPKHFTEDGNILQLANLPDLYKVFERC

SEQ ID NO: 366 - protein, 756 aa, Homo sapiens
MSFVAGVIRRLDETVVNRIAAGEVIQRPANAIKEMIENCLDAKSTSIQVIVKEGGLKLIQIQDNGTGIRKEDLDIVCERFTTSKLQSFEDLASISTYGFRGEALASISHVAHVTITTKTADGKCAYRPSYSDGKLKAPPKPCAGNQGTQITVEDLFYNIATRRKALKNPSEEYGKILEVVGRYSVHNAGISFSVKKQGETVADVRTLPNASTVDNIRSVFGNAVSRELIEIGCEDKTLAFKMNGYISNANYSVKKCIFLLFINHRLVESTSLRKAIETVYAAYLPKNTHPFLYLSLEISPQNVDVNVHPTKHEVHFLHEESILERVQQHIESKLLGSNSSRMYFTQTLLPGLAGPSGEMVKSTTSLTSSSTSGSSDKVYAHQMVRTDSREQKLDAFLQPLSKPLSSQPQAIVTEDKTDISSGRARQQDEEMLELPAPAEVAAKNQSLEGDTTKGTSEMSEKRGPTSSNPRKRHREDSDVEMVEDDSRKEMTAACTPRRRIINLTSVLSLQEEINEQGHEVLREMLHNHSFVGCVNPQWALAQHQTKLYLLNTTKLSEELFYQILIYDFANFGVLRLSEPAPLFDLAMLALDSPESGWTEEDGPKEGLAEYIVEFLKKKAEMLADYFSLEIDEEGNLIGLPLLIDNYVPPLEGLPIFILRLATEVNWDEEKECFESLSKECAMFYSIRKQYISEESTLSGQQSEVPGSIPNSWKWTVEHIVYKALRSHILPPKHFTEDGNILQLANLPDLYKVFERC

SEQ ID NO: 367 - protein, 756 aa, Homo sapiens
MSFVAGVIRRLDETVVNRIAAGEVIQRPANAIKEMIENCLDAKSTSIQVIVKEGGLKLIQIQDNGTGIRKEDLDIVCERFTTSKLQSFEDLASISTYGFRGEALASISHVAHVTITTKTADGKCAYRASYSDGKLKAPPKPCAGNQGTQITVEDLFYNIATRRKALKNPSEEYGKILEVVGGYSVHNAGISFSVKKQGETVADVRTLPNASTVDNIRSVFGNAVSRELIEIGCEDKTLAFKMNGYISNANYSVKKCIFLLFINHRLVESTSLRKAIETVYAAYLPKNTHPFLYLSLEISPQNVDVNVHPTKHEVHFLHEESILERVQQHIESKLLGSNSSRMYFTQTLLPGLAGPSGEMVKSTTSLTSSSTSGSSDKVYAHQMVRTDSREQKLDAFLQPLSKPLSSQPQAIVTEDKTDISSGRARQQDEEMLELPAPAEVAAKNQSLEGDTTKGTSEMSEKRGPTSSNPRKRHREDSDVEMVEDDSRKEMTAACTPRRRIINLTSVLSLQEEINEQGHEVLREMLHNHSFVGCVNPQWALAQHQTKLYLLNTTKLSEELFYQILIYDFANFGVLRLSEPAPLFDLAMLALDSPESGWTEEDGPKEGLAEYIVEFLKKKAEMLADYFSLEIDEEGNLIGLPLLIDNYVPPLEGLPIFILRLATEVNWDEEKECFESLSKECAMFYSIRKQYISEESTLSGQQSEVPGSIPNSWKWTVEHIVYKALRSHILPPKHFTEDGNILQLANLPDLYKVFERC

SEQ ID NO: 368 - protein, 756 aa, Homo sapiens
MSFVAGVIRRLDETVVNRIAAGEVIQRPANAIKEMIENCLDAKSTSIQVIVKEGGLKLIQIQDNGTGIRKEDLDIVCERFTTSKLQSFEDLASISTYGFRGEALASISHVAHVTITTKTADGKCAYRASYSDGKLKAPPKPCAGNQGTQITVEDLFYNIATRRKALKNPSEEYGKILEVVGRYSVHNAGISFPVKKQGETVADVRTLPNASTVDNIRSVFGNAVSRELIEIGCEDKTLAFKMNGYISNANYSVKKCIFLLFINHRLVESTSLRKAIETVYAAYLPKNTHPFLYLSLEISPQNVDVNVHPTKHEVHFLHEESILERVQQHIESKLLGSNSSRMYFTQTLLPGLAGPSGEMVKSTTSLTSSSTSGSSDKVYAHQMVRTDSREQKLDAFLQPLSKPLSSQPQAIVTEDKTDISSGRARQQDEEMLELPAPAEVAAKNQSLEGDTTKGTSEMSEKRGPTSSNPRKRHREDSDVEMVEDDSRKEMTAACTPRRRIINLTSVLSLQEEINEQGHEVLREMLHNHSFVGCVNPQWALAQHQTKLYLLNTTKLSEELFYQILIYDFANFGVLRLSEPAPLFDLAMLALDSPESGWTEEDGPKEGLAEYIVEFLKKKAEMLADYFSLEIDEEGNLIGLPLLIDNYVPPLEGLPIFILRLATEVNWDEEKECFESLSKECAMFYSIRKQYISEESTLSGQQSEVPGSIPNSWKWTVEHIVYKALRSHILPPKHFTEDGNILQLANLPDLYKVFERC

SEQ ID NO: 369 - protein, 756 aa, Homo sapiens
MSFVAGVIRRLDETVVNRIAAGEVIQRPANAIKEMIENCLDAKSTSIQVIVKEGGLKLIQIQDNGTGIRKEDLDIVCERFTTSKLQSFEDLASISTYGFRGEALASISHVAHVTITTKTADGKCAYRASYSDGKLKAPPKPCAGNQGTQITVEDLFYNIATRRKALKNPSEEYGKILEVVGRYSVHNAGISFSVKKQGETVADVRTLPNASTVDNIRSVFGNAVSRELIEIGCEDKTLAFKMNGYISNANYSVKKCIFLLFINHRLVESTSLRKAIETVYAAYLPKNTHPFLYLSLEISPQNVDVNVHPTKHEVHFLHEESILERVQQHIESKLLGSNSSRMYFTQTLLPGLAGPSGEMVKSTTSLTSSSTSGSSDKVYAHQMVRTDSREQKLDAFLQPLSKPLSSQPQAIVTEDKTDISSGRARQQDEEMLELPAPAEVAAKNQSLEGDTTKGTSEMSEKRGPTSSNPRKRHREDSDVEMVEDDSRKEMTAACTPRRRIINLTSVLSLQEEINEQGHEVLREMLHNHSFVGCVNPQWALAPHQTKLYLLNTTKLSEELFYQILIYDFANFGVLRLSEPAPLFDLAMLALDSPESGWTEEDGPKEGLAEYIVEFLKKKAEMLADYFSLEIDEEGNLIGLPLLIDNYVPPLEGLPIFILRLATEVNWDEEKECFESLSKECAMFYSIRKQYISEESTLSGQQSEVPGSIPNSWKWTVEHIVYKALRSHILPPKHFTEDGNILQLANLPDLYKVFERC

SEQ ID NO: 370 - protein, 756 aa, Homo sapiens
MSFVAGVIRRLDETVVNRIAAGEVIQRPANAIKEMIENCLDAKSTSIQVIVKEGGLKLIQIQDNGTGIRKEDLDIVCERFTTSKLQSFEDLASISTYGFRGEALASISHVAHVTITTKTADGKCAYRASYSDGKLKAPPKPCAGNQGTQITVEDLFYNIATRRKALKNPSEEYGKILEVVGRYSVHNAGISFSVKKQGETVADVRTLPNASTVDNIRSVFGNAVSRELIEIGCEDKTLAFKMNGYISNANYSVKKCIFLLFINHRLVESTSLRKAIETVYAAYLPKNTHPFLYLSLEISPQNVDVNVHPTKHEVHFLHEESILERVQQHIESKLLGSNSSRMYFTQTLLPGLAGPSGEMVKSTTSLTSSSTSGSSDKVYAHQMVRTDSREQKLDAFLQPLSKPLSSQPQAIVTEDKTDISSGRARQQDEEMLELPAPAEVAAKNQSLEGDTTKGTSEMSEKRGPTSSNPRKRHREDSDVEMVEDDSRKEMTAACTPRRRIINLTSVLSLQEEINEQGHEVLREMLHNHSFVGCVNPQWALAQHQTKLYPLNTTKLSEELFYQILIYDFANFGVLRLSEPAPLFDLAMLALDSPESGWTEEDGPKEGLAEYIVEFLKKKAEMLADYFSLEIDEEGNLIGLPLLIDNYVPPLEGLPIFILRLATEVNWDEEKECFESLSKECAMFYSIRKQYISEESTLSGQQSEVPGSIPNSWKWTVEHIVYKALRSHILPPKHFTEDGNILQLANLPDLYKVFERC

SEQ ID NO: 371 - protein, 756 aa, Homo sapiens
MSFVAGVIRRLDETVVNRIAAGEVIQRPANAIKEMIENCLDAKSTSIQVIVKEGGLKLIQIQDNGTGIRKEDLDIVCERFTTSKLQSFEDLASISTYGFRGEALASISHVAHVTITTKTADGKCAYRASYSDGKLKAPPKPCAGNQGTQITVEDLFYNIATRRKALKNPSEEYGKILEVVGRYSVHNAGISFSVKKQGETVADVRTLPNASTVDNIRSVFGNAVSRELIEIGCEDKTLAFKMNGYISNANYSVKKCIFLLFINHRLVESTSLRKAIETVYAAYLPKNTHPFLYLSLEISPQNVDVNVHPTKHEVHFLHEESILERVQQHIESKLLGSNSSRMYFTQTLLPGLAGPSGEMVKSTTSLTSSSTSGSSDKVYAHQMVRTDSREQKLDAFLQPLSKPLSSQPQAIVTEDKTDISSGRARQQDEEMLELPAPAEVAAKNQSLEGDTTKGTSEMSEKRGPTSSNPRKRHREDSDVEMVEDDSRKEMTAACTPRRRIINLTSVLSLQEEINEQGHEVLREMLHNHSFVGCVNPQWALAQHQTKLYLLNTTKLSEELFYQILIYDFANFGVLRLSEPAPLFDLAMLALDSPESGWTEEDGPKEGLAEYIVEFLKKKAEMLADYFSLEIDEEGNLIGLPLLIDNYVPPLEGLPIFILRLATGVNWDEEKECFESLSKECAMFYSIRKQYISEESTLSGQQSEVPGSIPNSWKWTVEHIVYKALRSHILPPKHFTEDGNILQLANLPDLYKVFERC

SEQ ID NO: 372 - protein, 756 aa, Homo sapiens
MSFVAGVIRRLDETVVNRIAAGEVIQRPANAIKEMIENCLDAKSTSIQVIVKEGGLKLIQIQDNGTGIRKEDLDIVCERFTTSKLQSFEDLASISTYGFRGEALASISHVAHVTITTKTADGKCAYRASYSDGKLKAPPKPCAGNQGTQITVEDLFYNIATRRKALKNPSEEYGKILEVVGRYSVHNAGISFSVKKQGETVADVRTLPNASTVDNIRSVFGNAVSRELIEIGCEDKTLAFKMNGYISNANYSVKKCIFLLFINHRLVESTSLRKAIETVYAAYLPKNTHPFLYLSLEISPQNVDVNVHPTKHEVHFLHEESILERVQQHIESKLLGSNSSRMYFTQTLLPGLAGPSGEMVKSTTSLTSSSTSGSSDKVYAHQMVRTDSREQKLDAFLQPLSKPLSSQPQAIVTEDKTDISSGRARQQDEEMLELPAPAEVAAKNQSLEGDTTKGTSEMSEKRGPTSSNPRKRHREDSDVEMVEDDSRKEMTAACTPRRRIINLTSVLSLQEEINEQGHEVLREMLHNHSFVGCVNPQWALAQHQTKLYLLNTTKLSEELFYQILIYDFANFGVLRLSEPAPLFDLAMLALDSPESGWTEEDGPKEGLAEYIVEFLKKKAEMLADYFSLEIDEEGNLIGLPLLIDNYVPPLEGLPIFILRLATEVNWDEEKECFESLSKECAMFYSIRKQYISEESTLSGQQSEVPGSIPNSWKWTVEHIVYKALRSHILPPKHFTEDGNILQLANLPDLYKVFESC

SEQ ID NO: 373 - protein, 756 aa, Homo sapiens
MSFVAGVIRRLDETVVNRIAAGEVIQRPSNAIKEMIENCLDAKSTSIQVIVKEGGLKLIQIQDNGTGIRKEDLDIVCERFTTSKLQSFEDLASISTYGFRGEALASISHVAHVTITTKTADGKCAYRASYSDGKLKAPPKPCAGNQGTQITVEDLFYNIATRRKALKNPSEEYGKILEVVGRYSVHNAGISFSVKKQGETVADVRTLPNASTVDNIRSVFGNAVSRELIEIGCEDKTLAFKMNGYISNANYSVKKCIFLLFINHRLVESTSLRKAIETVYAAYLPKNTHPFLYLSLEISPQNVDVNVHPTKHEVHFLHEESILERVQQHIESKLLGSNSSRMYFTQTLLPGLAGPSGEMVKSTTSLTSSSTSGSSDKVYAHQMVRTDSREQKLDAFLQPLSKPLSSQPQAIVTEDKTDISSGRARQQDEEMLELPAPAEVAAKNQSLEGDTTKGTSEMSEKRGPTSSNPRKRHREDSDVEMVEDDSRKEMTAACTPRRRIINLTSVLSLQEEINEQGHEVLREMLHNHSFVGCVNPQWALAQHQTKLYLLNTTKLSEELFYQILIYDFANFGVLRLSEPAPLFDLAMLALDSPESGWTEEDGPKEGLAEYIVEFLKKKAEMLADYFSLEIDEEGNLIGLPLLIDNYVPPLEGLPIFILRLATEVNWDEEKECFESLSKECAMFYSIRKQYISEESTLSGQQSEVPGSIPNSWKWTVEHIVYKALRSHILPPKHFTEDGNILQLANLPDLYKVFERC

SEQ ID NO: 374 - protein, 756 aa, Homo sapiens
MSFVAGVIRRLDETVVNRIAAGEVIQRPANAVKEMIENCLDAKSTSIQVIVKEGGLKLIQIQDNGTGIRKEDLDIVCERFTTSKLQSFEDLASISTYGFRGEALASISHVAHVTITTKTADGKCAYRASYSDGKLKAPPKPCAGNQGTQITVEDLFYNIATRRKALKNPSEEYGKILEVVGRYSVHNAGISFSVKKQGETVADVRTLPNASTVDNIRSVFGNAVSRELIEIGCEDKTLAFKMNGYISNANYSVKKCIFLLFINHRLVESTSLRKAIETVYAAYLPKNTHPFLYLSLEISPQNVDVNVHPTKHEVHFLHEESILERVQQHIESKLLGSNSSRMYFTQTLLPGLAGPSGEMVKSTTSLTSSSTSGSSDKVYAHQMVRTDSREQKLDAFLQPLSKPLSSQPQAIVTEDKTDISSGRARQQDEEMLELPAPAEVAAKNQSLEGDTTKGTSEMSEKRGPTSSNPRKRHREDSDVEMVEDDSRKEMTAACTPRRRIINLTSVLSLQEEINEQGHEVLREMLHNHSFVGCVNPQWALAQHQTKLYLLNTTKLSEELFYQILIYDFANFGVLRLSEPAPLFDLAMLALDSPESGWTEEDGPKEGLAEYIVEFLKKKAEMLADYFSLEIDEEGNLIGLPLLIDNYVPPLEGLPIFILRLATEVNWDEEKECFESLSKECAMFYSIRKQYISEESTLSGQQSEVPGSIPNSWKWTVEHIVYKALRSHILPPKHFTEDGNILQLANLPDLYKVFERC

SEQ ID NO: 375 - protein, 756 aa, Homo sapiens
MSFVAGVIRRLDETVVNRIAAGEVIQRPANAIKEMLENCLDAKSTSIQVIVKEGGLKLIQIQDNGTGIRKEDLDIVCERFTTSKLQSFEDLASISTYGFRGEALASISHVAHVTITTKTADGKCAYRASYSDGKLKAPPKPCAGNQGTQITVEDLFYNIATRRKALKNPSEEYGKILEVVGRYSVHNAGISFSVKKQGETVADVRTLPNASTVDNIRSVFGNAVSRELIEIGCEDKTLAFKMNGYISNANYSVKKCIFLLFINHRLVESTSLRKAIETVYAAYLPKNTHPFLYLSLEISPQNVDVNVHPTKHEVHFLHEESILERVQQHIESKLLGSNSSRMYFTQTLLPGLAGPSGEMVKSTTSLTSSSTSGSSDKVYAHQMVRTDSREQKLDAFLQPLSKPLSSQPQAIVTEDKTDISSGRARQQDEEMLELPAPAEVAAKNQSLEGDTTKGTSEMSEKRGPTSSNPRKRHREDSDVEMVEDDSRKEMTAACTPRRRIINLTSVLSLQEEINEQGHEVLREMLHNHSFVGCVNPQWALAQHQTKLYLLNTTKLSEELFYQILIYDFANFGVLRLSEPAPLFDLAMLALDSPESGWTEEDGPKEGLAEYIVEFLKKKAEMLADYFSLEIDEEGNLIGLPLLIDNYVPPLEGLPIFILRLATEVNWDEEKECFESLSKECAMFYSIRKQYISEESTLSGQQSEVPGSIPNSWKWTVEHIVYKALRSHILPPKHFTEDGNILQLANLPDLYKVFERC

SEQ ID NO: 376 - protein, 756 aa, Homo sapiens
MSFVAGVIRRLDETVVNRIAAGEVIQRPANAIKEMIENCLDACSTSIQVIVKEGGLKLIQIQDNGTGIRKEDLDIVCERFTTSKLQSFEDLASISTYGFRGEALASISHVAHVTITTKTADGKCAYRASYSDGKLKAPPKPCAGNQGTQITVEDLFYNIATRRKALKNPSEEYGKILEVVGRYSVHNAGISFSVKKQGETVADVRTLPNASTVDNIRSVFGNAVSRELIEIGCEDKTLAFKMNGYISNANYSVKKCIFLLFINHRLVESTSLRKAIETVYAAYLPKNTHPFLYLSLEISPQNVDVNVHPTKHEVHFLHEESILERVQQHIESKLLGSNSSRMYFTQTLLPGLAGPSGEMVKSTTSLTSSSTSGSSDKVYAHQMVRTDSREQKLDAFLQPLSKPLSSQPQAIVTEDKTDISSGRARQQDEEMLELPAPAEVAAKNQSLEGDTTKGTSEMSEKRGPTSSNPRKRHREDSDVEMVEDDSRKEMTAACTPRRRIINLTSVLSLQEEINEQGHEVLREMLHNHSFVGCVNPQWALAQHQTKLYLLNTTKLSEELFYQILIYDFANFGVLRLSEPAPLFDLAMLALDSPESGWTEEDGPKEGLAEYIVEFLKKKAEMLADYFSLEIDEEGNLIGLPLLIDNYVPPLEGLPIFILRLATEVNWDEEKECFESLSKECAMFYSIRKQYISEESTLSGQQSEVPGSIPNSWKWTVEHIVYKALRSHILPPKHFTEDGNILQLANLPDLYKVFERC

SEQ ID NO: 377 - protein, 756 aa, Homo sapiens
MSFVAGVIRRLDETVVNRIAAGEVIQRPANAIKEMIENCLDAGSTSIQVIVKEGGLKLIQIQDNGTGIRKEDLDIVCERFTTSKLQSFEDLASISTYGFRGEALASISHVAHVTITTKTADGKCAYRASYSDGKLKAPPKPCAGNQGTQITVEDLFYNIATRRKALKNPSEEYGKILEVVGRYSVHNAGISFSVKKQGETVADVRTLPNASTVDNIRSVFGNAVSRELIEIGCEDKTLAFKMNGYISNANYSVKKCIFLLFINHRLVESTSLRKAIETVYAAYLPKNTHPFLYLSLEISPQNVDVNVHPTKHEVHFLHEESILERVQQHIESKLLGSNSSRMYFTQTLLPGLAGPSGEMVKSTTSLTSSSTSGSSDKVYAHQMVRTDSREQKLDAFLQPLSKPLSSQPQAIVTEDKTDISSGRARQQDEEMLELPAPAEVAAKNQSLEGDTTKGTSEMSEKRGPTSSNPRKRHREDSDVEMVEDDSRKEMTAACTPRRRIINLTSVLSLQEEINEQGHEVLREMLHNHSFVGCVNPQWALAQHQTKLYLLNTTKLSEELFYQILIYDFANFGVLRLSEPAPLFDLAMLALDSPESGWTEEDGPKEGLAEYIVEFLKKKAEMLADYFSLEIDEEGNLIGLPLLIDNYVPPLEGLPIFILRLATEVNWDEEKECFESLSKECAMFYSIRKQYISEESTLSGQQSEVPGSIPNSWKWTVEHIVYKALRSHILPPKHFTEDGNILQLANLPDLYKVFERC

SEQ ID NO: 378 - protein, 756 aa, Homo sapiens
MSFVAGVIRRLDETVVNRIAAGEVIQRPANAIKEMIENCLDANSTSIQVIVKEGGLKLIQIQDNGTGIRKEDLDIVCERFTTSKLQSFEDLASISTYGFRGEALASISHVAHVTITTKTADGKCAYRASYSDGKLKAPPKPCAGNQGTQITVEDLFYNIATRRKALKNPSEEYGKILEVVGRYSVHNAGISFSVKKQGETVADVRTLPNASTVDNIRSVFGNAVSRELIEIGCEDKTLAFKMNGYISNANYSVKKCIFLLFINHRLVESTSLRKAIETVYAAYLPKNTHPFLYLSLEISPQNVDVNVHPTKHEVHFLHEESILERVQQHIESKLLGSNSSRMYFTQTLLPGLAGPSGEMVKSTTSLTSSSTSGSSDKVYAHQMVRTDSREQKLDAFLQPLSKPLSSQPQAIVTEDKTDISSGRARQQDEEMLELPAPAEVAAKNQSLEGDTTKGTSEMSEKRGPTSSNPRKRHREDSDVEMVEDDSRKEMTAACTPRRRIINLTSVLSLQEEINEQGHEVLREMLHNHSFVGCVNPQWALAQHQTKLYLLNTTKLSEELFYQILIYDFANFGVLRLSEPAPLFDLAMLALDSPESGWTEEDGPKEGLAEYIVEFLKKKAEMLADYFSLEIDEEGNLIGLPLLIDNYVPPLEGLPIFILRLATEVNWDEEKECFESLSKECAMFYSIRKQYISEESTLSGQQSEVPGSIPNSWKWTVEHIVYKALRSHILPPKHFTEDGNILQLANLPDLYKVFERC

SEQ ID NO: 379 - protein, 756 aa, Homo sapiens
MSFVAGVIRRLDETVVNRIAAGEVIQRPANAIKEMIENCLDAQSTSIQVIVKEGGLKLIQIQDNGTGIRKEDLDIVCERFTTSKLQSFEDLASISTYGFRGEALASISHVAHVTITTKTADGKCAYRASYSDGKLKAPPKPCAGNQGTQITVEDLFYNIATRRKALKNPSEEYGKILEVVGRYSVHNAGISFSVKKQGETVADVRTLPNASTVDNIRSVFGNAVSRELIEIGCEDKTLAFKMNGYISNANYSVKKCIFLLFINHRLVESTSLRKAIETVYAAYLPKNTHPFLYLSLEISPQNVDVNVHPTKHEVHFLHEESILERVQQHIESKLLGSNSSRMYFTQTLLPGLAGPSGEMVKSTTSLTSSSTSGSSDKVYAHQMVRTDSREQKLDAFLQPLSKPLSSQPQAIVTEDKTDISSGRARQQDEEMLELPAPAEVAAKNQSLEGDTTKGTSEMSEKRGPTSSNPRKRHREDSDVEMVEDDSRKEMTAACTPRRRIINLTSVLSLQEEINEQGHEVLREMLHNHSFVGCVNPQWALAQHQTKLYLLNTTKLSEELFYQILIYDFANFGVLRLSEPAPLFDLAMLALDSPESGWTEEDGPKEGLAEYIVEFLKKKAEMLADYFSLEIDEEGNLIGLPLLIDNYVPPLEGLPIFILRLATEVNWDEEKECFESLSKECAMFYSIRKQYISEESTLSGQQSEVPGSIPNSWKWTVEHIVYKALRSHILPPKHFTEDGNILQLANLPDLYKVFERC

SEQ ID NO: 380 - protein, 756 aa, Homo sapiens
MSFVAGVIRRLDETVVNRIAAGEVIQRPANAIKEMIENCLDARSTSIQVIVKEGGLKLIQIQDNGTGIRKEDLDIVCERFTTSKLQSFEDLASISTYGFRGEALASISHVAHVTITTKTADGKCAYRASYSDGKLKAPPKPCAGNQGTQITVEDLFYNIATRRKALKNPSEEYGKILEVVGRYSVHNAGISFSVKKQGETVADVRTLPNASTVDNIRSVFGNAVSRELIEIGCEDKTLAFKMNGYISNANYSVKKCIFLLFINHRLVESTSLRKAIETVYAAYLPKNTHPFLYLSLEISPQNVDVNVHPTKHEVHFLHEESILERVQQHIESKLLGSNSSRMYFTQTLLPGLAGPSGEMVKSTTSLTSSSTSGSSDKVYAHQMVRTDSREQKLDAFLQPLSKPLSSQPQAIVTEDKTDISSGRARQQDEEMLELPAPAEVAAKNQSLEGDTTKGTSEMSEKRGPTSSNPRKRHREDSDVEMVEDDSRKEMTAACTPRRRIINLTSVLSLQEEINEQGHEVLREMLHNHSFVGCVNPQWALAQHQTKLYLLNTTKLSEELFYQILIYDFANFGVLRLSEPAPLFDLAMLALDSPESGWTEEDGPKEGLAEYIVEFLKKKAEMLADYFSLEIDEEGNLIGLPLLIDNYVPPLEGLPIFILRLATEVNWDEEKECFESLSKECAMFYSIRKQYISEESTLSGQQSEVPGSIPNSWKWTVEHIVYKALRSHILPPKHFTEDGNILQLANLPDLYKVFERC

SEQ ID NO: 381 - protein, 756 aa, Homo sapiens
MSFVAGVIRRLDETVVNRIAAGEVIQRPANAIKEMIENCLDAKSTSIQVIVKEGGLKLIQIRDNGTGIRKEDLDIVCERFTTSKLQSFEDLASISTYGFRGEALASISHVAHVTITTKTADGKCAYRASYSDGKLKAPPKPCAGNQGTQITVEDLFYNIATRRKALKNPSEEYGKILEVVGRYSVHNAGISFSVKKQGETVADVRTLPNASTVDNIRSVFGNAVSRELIEIGCEDKTLAFKMNGYISNANYSVKKCIFLLFINHRLVESTSLRKAIETVYAAYLPKNTHPFLYLSLEISPQNVDVNVHPTKHEVHFLHEESILERVQQHIESKLLGSNSSRMYFTQTLLPGLAGPSGEMVKSTTSLTSSSTSGSSDKVYAHQMVRTDSREQKLDAFLQPLSKPLSSQPQAIVTEDKTDISSGRARQQDEEMLELPAPAEVAAKNQSLEGDTTKGTSEMSEKRGPTSSNPRKRHREDSDVEMVEDDSRKEMTAACTPRRRIINLTSVLSLQEEINEQGHEVLREMLHNHSFVGCVNPQWALAQHQTKLYLLNTTKLSEELFYQILIYDFANFGVLRLSEPAPLFDLAMLALDSPESGWTEEDGPKEGLAEYIVEFLKKKAEMLADYFSLEIDEEGNLIGLPLLIDNYVPPLEGLPIFILRLATEVNWDEEKECFESLSKECAMFYSIRKQYISEESTLSGQQSEVPGSIPNSWKWTVEHIVYKALRSHILPPKHFTEDGNILQLANLPDLYKVFERC

SEQ ID NO: 382 - protein, 756 aa, Homo sapiens
MSFVAGVIRRLDETVVNRIAAGEVIQRPANAIKEMIENCLDAKSTSIQVIVKEGGLKLIQIQDDGTGIRKEDLDIVCERFTTSKLQSFEDLASISTYGFRGEALASISHVAHVTITTKTADGKCAYRASYSDGKLKAPPKPCAGNQGTQITVEDLFYNIATRRKALKNPSEEYGKILEVVGRYSVHNAGISFSVKKQGETVADVRTLPNASTVDNIRSVFGNAVSRELIEIGCEDKTLAFKMNGYISNANYSVKKCIFLLFINHRLVESTSLRKAIETVYAAYLPKNTHPFLYLSLEISPQNVDVNVHPTKHEVHFLHEESILERVQQHIESKLLGSNSSRMYFTQTLLPGLAGPSGEMVKSTTSLTSSSTSGSSDKVYAHQMVRTDSREQKLDAFLQPLSKPLSSQPQAIVTEDKTDISSGRARQQDEEMLELPAPAEVAAKNQSLEGDTTKGTSEMSEKRGPTSSNPRKRHREDSDVEMVEDDSRKEMTAACTPRRRIINLTSVLSLQEEINEQGHEVLREMLHNHSFVGCVNPQWALAQHQTKLYLLNTTKLSEELFYQILIYDFANFGVLRLSEPAPLFDLAMLALDSPESGWTEEDGPKEGLAEYIVEFLKKKAEMLADYFSLEIDEEGNLIGLPLLIDNYVPPLEGLPIFILRLATEVNWDEEKECFESLSKECAMFYSIRKQYISEESTLSGQQSEVPGSIPNSWKWTVEHIVYKALRSHILPPKHFTEDGNILQLANLPDLYKVFERC

SEQ ID NO: 383 - protein, 756 aa, Homo sapiens
MSFVAGVIRRLDETVVNRIAAGEVIQRPANAIKEMIENCLDAKSTSIQVIVKEGGLKLIQIQDNGTGIRKDDLDIVCERFTTSKLQSFEDLASISTYGFRGEALASISHVAHVTITTKTADGKCAYRASYSDGKLKAPPKPCAGNQGTQITVEDLFYNIATRRKALKNPSEEYGKILEVVGRYSVHNAGISFSVKKQGETVADVRTLPNASTVDNIRSVFGNAVSRELIEIGCEDKTLAFKMNGYISNANYSVKKCIFLLFINHRLVESTSLRKAIETVYAAYLPKNTHPFLYLSLEISPQNVDVNVHPTKHEVHFLHEESILERVQQHIESKLLGSNSSRMYFTQTLLPGLAGPSGEMVKSTTSLTSSSTSGSSDKVYAHQMVRTDSREQKLDAFLQPLSKPLSSQPQAIVTEDKTDISSGRARQQDEEMLELPAPAEVAAKNQSLEGDTTKGTSEMSEKRGPTSSNPRKRHREDSDVEMVEDDSRKEMTAACTPRRRIINLTSVLSLQEEINEQGHEVLREMLHNHSFVGCVNPQWALAQHQTKLYLLNTTKLSEELFYQILIYDFANFGVLRLSEPAPLFDLAMLALDSPESGWTEEDGPKEGLAEYIVEFLKKKAEMLADYFSLEIDEEGNLIGLPLLIDNYVPPLEGLPIFILRLATEVNWDEEKECFESLSKECAMFYSIRKQYISEESTLSGQQSEVPGSIPNSWKWTVEHIVYKALRSHILPPKHFTEDGNILQLANLPDLYKVFERC

SEQ ID NO: 384 - protein, 756 aa, Homo sapiens
MSFVAGVIRRLDETVVNRIAAGEVIQRPANAIKEMIENCLDAKSTSIQVIVKEGGLKLIQIQDNGTGIRKEDLDTVCERFTTSKLQSFEDLASISTYGFRGEALASISHVAHVTITTKTADGKCAYRASYSDGKLKAPPKPCAGNQGTQITVEDLFYNIATRRKALKNPSEEYGKILEVVGRYSVHNAGISFSVKKQGETVADVRTLPNASTVDNIRSVFGNAVSRELIEIGCEDKTLAFKMNGYISNANYSVKKCIFLLFINHRLVESTSLRKAIETVYAAYLPKNTHPFLYLSLEISPQNVDVNVHPTKHEVHFLHEESILERVQQHIESKLLGSNSSRMYFTQTLLPGLAGPSGEMVKSTTSLTSSSTSGSSDKVYAHQMVRTDSREQKLDAFLQPLSKPLSSQPQAIVTEDKTDISSGRARQQDEEMLELPAPAEVAAKNQSLEGDTTKGTSEMSEKRGPTSSNPRKRHREDSDVEMVEDDSRKEMTAACTPRRRIINLTSVLSLQEEINEQGHEVLREMLHNHSFVGCVNPQWALAQHQTKLYLLNTTKLSEELFYQILIYDFANFGVLRLSEPAPLFDLAMLALDSPESGWTEEDGPKEGLAEYIVEFLKKKAEMLADYFSLEIDEEGNLIGLPLLIDNYVPPLEGLPIFILRLATEVNWDEEKECFESLSKECAMFYSIRKQYISEESTLSGQQSEVPGSIPNSWKWTVEHIVYKALRSHILPPKHFTEDGNILQLANLPDLYKVFERC

SEQ ID NO: 385 - protein, 756 aa, Homo sapiens
MSFVAGVIRRLDETVVNRIAAGEVIQRPANAIKEMIENCLDAKSTSIQVIVKEGGLKLIQIQDNGTGIRKEDLDIVCERFTTSKLQSFEDLASITTYGFRGEALASISHVAHVTITTKTADGKCAYRASYSDGKLKAPPKPCAGNQGTQITVEDLFYNIATRRKALKNPSEEYGKILEVVGRYSVHNAGISFSVKKQGETVADVRTLPNASTVDNIRSVFGNAVSRELIEIGCEDKTLAFKMNGYISNANYSVKKCIFLLFINHRLVESTSLRKAIETVYAAYLPKNTHPFLYLSLEISPQNVDVNVHPTKHEVHFLHEESILERVQQHIESKLLGSNSSRMYFTQTLLPGLAGPSGEMVKSTTSLTSSSTSGSSDKVYAHQMVRTDSREQKLDAFLQPLSKPLSSQPQAIVTEDKTDISSGRARQQDEEMLELPAPAEVAAKNQSLEGDTTKGTSEMSEKRGPTSSNPRKRHREDSDVEMVEDDSRKEMTAACTPRRRIINLTSVLSLQEEINEQGHEVLREMLHNHSFVGCVNPQWALAQHQTKLYLLNTTKLSEELFYQILIYDFANFGVLRLSEPAPLFDLAMLALDSPESGWTEEDGPKEGLAEYIVEFLKKKAEMLADYFSLEIDEEGNLIGLPLLIDNYVPPLEGLPIFILRLATEVNWDEEKECFESLSKECAMFYSIRKQYISEESTLSGQQSEVPGSIPNSWKWTVEHIVYKALRSHILPPKHFTEDGNILQLANLPDLYKVFERC

SEQ ID NO: 386 - protein, 756 aa, Homo sapiens
MSFVAGVIRRLDETVVNRIAAGEVIQRPANAIKEMIENCLDAKSTSIQVIVKEGGLKLIQIQDNGTGIRKEDLDIVCERFTTSKLQSFEDLASISTYGFRGEALASISHVAHVTITTKTADGKCAYRASYSDGKLSAPPKPCAGNQGTQITVEDLFYNIATRRKALKNPSEEYGKILEVVGRYSVHNAGISFSVKKQGETVADVRTLPNASTVDNIRSVFGNAVSRELIEIGCEDKTLAFKMNGYISNANYSVKKCIFLLFINHRLVESTSLRKAIETVYAAYLPKNTHPFLYLSLEISPQNVDVNVHPTKHEVHFLHEESILERVQQHIESKLLGSNSSRMYFTQTLLPGLAGPSGEMVKSTTSLTSSSTSGSSDKVYAHQMVRTDSREQKLDAFLQPLSKPLSSQPQAIVTEDKTDISSGRARQQDEEMLELPAPAEVAAKNQSLEGDTTKGTSEMSEKRGPTSSNPRKRHREDSDVEMVEDDSRKEMTAACTPRRRIINLTSVLSLQEEINEQGHEVLREMLHNHSFVGCVNPQWALAQHQTKLYLLNTTKLSEELFYQILIYDFANFGVLRLSEPAPLFDLAMLALDSPESGWTEEDGPKEGLAEYIVEFLKKKAEMLADYFSLEIDEEGNLIGLPLLIDNYVPPLEGLPIFILRLATEVNWDEEKECFESLSKECAMFYSIRKQYISEESTLSGQQSEVPGSIPNSWKWTVEHIVYKALRSHILPPKHFTEDGNILQLANLPDLYKVFERC

SEQ ID NO: 387 - protein, 756 aa, Homo sapiens
MSFVAGVIRRLDETVVNRIAAGEVIQRPANAIKEMIENCLDAKSTSIQVIVKEGGLKLIQIQDNGTGIRKEDLDIVCERFTTSKLQSFEDLASISTYGFRGEALASISHVAHVTITTKTADGKCAYRASYSDGKLKAPPKPCAGNQGTQITVEDLFYNIVTRRKALKNPSEEYGKILEVVGRYSVHNAGISFSVKKQGETVADVRTLPNASTVDNIRSVFGNAVSRELIEIGCEDKTLAFKMNGYISNANYSVKKCIFLLFINHRLVESTSLRKAIETVYAAYLPKNTHPFLYLSLEISPQNVDVNVHPTKHEVHFLHEESILERVQQHIESKLLGSNSSRMYFTQTLLPGLAGPSGEMVKSTTSLTSSSTSGSSDKVYAHQMVRTDSREQKLDAFLQPLSKPLSSQPQAIVTEDKTDISSGRARQQDEEMLELPAPAEVAAKNQSLEGDTTKGTSEMSEKRGPTSSNPRKRHREDSDVEMVEDDSRKEMTAACTPRRRIINLTSVLSLQEEINEQGHEVLREMLHNHSFVGCVNPQWALAQHQTKLYLLNTTKLSEELFYQILIYDFANFGVLRLSEPAPLFDLAMLALDSPESGWTEEDGPKEGLAEYIVEFLKKKAEMLADYFSLEIDEEGNLIGLPLLIDNYVPPLEGLPIFILRLATEVNWDEEKECFESLSKECAMFYSIRKQYISEESTLSGQQSEVPGSIPNSWKWTVEHIVYKALRSHILPPKHFTEDGNILQLANLPDLYKVFERC

SEQ ID NO: 388 - protein, 756 aa, Homo sapiens
MSFVAGVIRRLDETVVNRIAAGEVIQRPANAIKEMIENCLDAKSTSIQVIVKEGGLKLIQIQDNGTGIRKEDLDIVCERFTTSKLQSFEDLASISTYGFRGEALASISHVAHVTITTKTADGKCAYRASYSDGKLKAPPKPCAGNQGTQITVEDLFYNIATRRKALKNPSEEYGKILEVVGRYSVHNAGISFSVKKQGETVADVRTLPNASTVDNIRSVFGNAVSRELIEIGCEDKTLAFKMNGYISNANYSVKKCIFLLFINHRLVESTSVRKAIETVYAAYLPKNTHPFLYLSLEISPQNVDVNVHPTKHEVHFLHEESILERVQQHIESKLLGSNSSRMYFTQTLLPGLAGPSGEMVKSTTSLTSSSTSGSSDKVYAHQMVRTDSREQKLDAFLQPLSKPLSSQPQAIVTEDKTDISSGRARQQDEEMLELPAPAEVAAKNQSLEGDTTKGTSEMSEKRGPTSSNPRKRHREDSDVEMVEDDSRKEMTAACTPRRRIINLTSVLSLQEEINEQGHEVLREMLHNHSFVGCVNPQWALAQHQTKLYLLNTTKLSEELFYQILIYDFANFGVLRLSEPAPLFDLAMLALDSPESGWTEEDGPKEGLAEYIVEFLKKKAEMLADYFSLEIDEEGNLIGLPLLIDNYVPPLEGLPIFILRLATEVNWDEEKECFESLSKECAMFYSIRKQYISEESTLSGQQSEVPGSIPNSWKWTVEHIVYKALRSHILPPKHFTEDGNILQLANLPDLYKVFERC

SEQ ID NO: 389 - protein, 756 aa, Homo sapiens
MSFVAGVIRRLDETVVNRIAAGEVIQRPANAIKEMIENCLDAKSTSIQVIVKEGGLKLIQIQDNGTGIRKEDLDIVCERFTTSKLQSFEDLASISTYGFRGEALASISHVAHVTITTKTADGKCAYRASYSDGKLKAPPKPCAGNQGTQITVEDLFYNIATRRKALKNPSEEYGKILEVVGRYSVHNAGISFSVKKQGETVADVRTLPNASTVDNIRSVFGNAVSRELIEIGCEDKTLAFKMNGYISNANYSVKKCIFLLFINHRLVESTSLRKAIETVYAAYLPKNTHPFLYLSLEISPQNVDVNVHPTKHEVHFLHEESILERVQQHIESKLLGSNSSRMYFTQTLLPGLAGPSGEMVKSTTSLTSSSTSGSSDKVYAHQMVRTDSREQKLDAFLQPLSKPLSSQPQAIVTEDKTDISSGRARQQDEEMLELPAPAEVTAKNQSLEGDTTKGTSEMSEKRGPTSSNPRKRHREDSDVEMVEDDSRKEMTAACTPRRRIINLTSVLSLQEEINEQGHEVLREMLHNHSFVGCVNPQWALAQHQTKLYLLNTTKLSEELFYQILIYDFANFGVLRLSEPAPLFDLAMLALDSPESGWTEEDGPKEGLAEYIVEFLKKKAEMLADYFSLEIDEEGNLIGLPLLIDNYVPPLEGLPIFILRLATEVNWDEEKECFESLSKECAMFYSIRKQYISEESTLSGQQSEVPGSIPNSWKWTVEHIVYKALRSHILPPKHFTEDGNILQLANLPDLYKVFERC

SEQ ID NO: 390 - protein, 756 aa, Homo sapiens
MSFVAGVIRRLDETVVNRIAAGEVIQRPANAIKEMIENCLDAKSTSIQVIVKEGGLKLIQIQDNGTGIRKEDLDIVCERFTTSKLQSFEDLASISTYGFRGEALASISHVAHVTITTKTADGKCAYRASYSDGKLKAPPKPCAGNQGTQITVEDLFYNIATRRKALKNPSEEYGKILEVVGRYSVHNAGISFSVKKQGETVADVRTLPNASTVDNIRSVFGNAVSRELIEIGCEDKTLAFKMNGYISNANYSVKKCIFLLFINHRLVESTSLRKAIETVYAAYLPKNTHPFLYLSLEISPQNVDVNVHPTKHEVHFLHEESILERVQQHIESKLLGSNSSRMYFTQTLLPGLAGPSGEMVKSTTSLTSSSTSGSSDKVYAHQMVRTDSREQKLDAFLQPLSKPLSSQPQAIVTEDKTDISSGRARQQDEEMLELPAPAEVAAKNQSLEGDTTKGTSEMSEKRGPTSSNPRKRHREDSDVEMVEDDSRKEMTAACTPRRRIINLTSVLSLQEEINEQGHEVLREMLHNHSFVGCVNPQWALAQHQTKLYLLNTTKLSEELFYQILIYDFANFGVLRLSEPAPLFDLAMLALDSPESGWTEEDGPKEGLAEYIVEFLKKKAEMLADYFSLEIDEEGNLIGLPLLIDNYVLPLEGLPIFILRLATEVNWDEEKECFESLSKECAMFYSIRKQYISEESTLSGQQSEVPGSIPNSWKWTVEHIVYKALRSHILPPKHFTEDGNILQLANLPDLYKVFERC

SEQ ID NO: 391 - protein, 756 aa, Homo sapiens
MSFVAGVIRRLDETVVNRIAAGEVIQRPANAIKEMIENCLDAKSTSIQVIVKEGGLKLIQIQDNGTGIRKEDLDIVCERFTTSKLQSFEDLASISTYGFRGEALASISHVAHVTITTKTADGKCAYRASYSDGKLKAPPKPCAGNQGTQITVEDLFYNIATRRKALKNPSEEYGKILEVVGRYSVHNAGISFSVKKQGETVADVRTLPNASTVDNIRSVFGNAVSRELIEIGCEDKTLAFKMNGYISNANYSVKKCIFLLFINHRLVESTSLRKAIETVYAAYLPKNTHPFLYLSLEISPQNVDVNVHPTKHEVHFLHEESILERVQQHIESKLLGSNSSRMYFTQTLLPGLAGPSGEMVKSTTSLTSSSTSGSSDKVYAHQMVRTDSREQKLDAFLQPLSKPLSSQPQAIVTEDKTDISSGRARQQDEEMLELPAPAEVAAKNQSLEGDTTKGTSEMSEKRGPTSSNPRKRHREDSDVEMVEDDSRKEMTAACTPRRRIINLTSVLSLQEEINEQGHEVLREMLHNHSFVGCVNPQWALAQHQTKLYLLNTTKLSEELFYQILIYDFANFGVLRLSEPAPLFDLAMLALDSPESGWTEEDGPKEGLAEYIVEFLKKKAEMLADYFSLEIDEEGNLIGLPLLIDNYVPPLEGLPIFILQLATEVNWDEEKECFESLSKECAMFYSIRKQYISEESTLSGQQSEVPGSIPNSWKWTVEHIVYKALRSHILPPKHFTEDGNILQLANLPDLYKVFERC

SEQ ID NO: 392 - protein, 934 aa, Homo sapiens [sequence omitted]

SEQ ID NO: 393 - protein, 934 aa, Homo sapiens [sequence omitted]

SEQ ID NO: 394 - protein, 934 aa, Homo sapiens
MAVQPKETLQLESAAEVGFVRFFQGMPEKPTTTVRLFDRGDFYTAHGEDALLAAREVFKTQGVIKYMGPAGAKNLQSVVLSKMNFESFVKDLLLVRQYRVEVYKNRAGNKASKENDWYLAYKASPGNLSQFEDILFGNNDMSASIGVVGVKMSAVDGQRQVGVGYVDSIQRKLGLCEFPDNDQFSNLEALLIQIGPKECVLPGGETAGDMGKLRQIIQRGGILITERKKADFSTKDIYQDLNRLLKGKKGEQMNSAVLPEMENQVAVSSLSAVIKFLELLSDDSNFGQFELTTFDFSQYMKLDIAAVRALNLFQGSVEDTTGSQSLAALLNKCKTPQGQRLVNQWIKQPLMDKNRIEERLNLVEAFVEDAELRQTLQEDLLRRFPDLNRLAKKFQRQAANLQDCYRLYQGINQLPNVIQALEKHEGKHQKLLLAVFVTPLTDLRSDFSKFQEMIETTLDMDQVENHEFLVKPSFDPNLSELREIMNDLEKKMQSTLISAARDPGLDPGKQIKLDSSAQFGYYFRVTCKEEKVLRNNKNFSTVDIQKNGVKFTNSKLTSLNEEYTKNKTEYEEAQDAIVKEIVNISSGYVEPMQTLNDVLAQLDAVVSFAHVSNGAPVPYVRPAILEKGQGRIILKASRHACVEVQDEIAFIPNDVYFEKDKQMFHIITGPNMGGKSTYIRQTGVIVLMAQIGCFVPCESAEVSIVDCILARVGAGDSQLKGVSTFMAEMLETASILRSATKDSLIIIDELGRGTSTYDGFGLAWAISEYIATKIGAFCMFATHFHELTALANQIPTVNNLHVTALTTEETLTMLYQVKKGVCDQSFGIHVAELANFPKHVIECAKQKALELEEFQYIGESQGYDIMEPAAKKCYLEREQGEKIIQEFLSKVKQMPFTEMSEENITIKLKQLKAEVIAKNNSFVNEIISRIKVTT

SEQ ID NO: 395 - protein, 934 aa, Homo sapiens [sequence omitted]

SEQ ID NO: 396 - protein, 934 aa, Homo sapiens
MAVQPKETLQLESAAEVGFVRFFQGMPEKPTTTVRLFDRGDFYMAHGEDALLAAREVFKTQGVIKYMGPAGAKNLQSVVLSKMNFESFVKDLLLVRQYRVEVYKNRAGNKASKENDWYLAYKASPGNLSQFEDILFGNNDMSASIGVVGVKMSAVDGQRQVGVGYVDSIQRKLGLCEFPDNDQFSNLEALLIQIGPKECVLPGGETAGDMGKLRQIIQRGGILITERKKADFSTKDIYQDLNRLLKGKKGEQMNSAVLPEMENQVAVSSLSAVIKFLELLSDDSNFGQFELTTFDFSQYMKLDIAAVRALNLFQGSVEDTTGSQSLAALLNKCKTPQGQRLVNQWIKQPLMDKNRIEERLNLVEAFVEDAELRQTLQEDLLRRFPDLNRLAKKFQRQAANLQDCYRLYQGINQLPNVIQALEKHEGKHQKLLLAVFVTPLTDLRSDFSKFQEMIETTLDMDQVENHEFLVKPSFDPNLSELREIMNDLEKKMQSTLISAARDLGLDPGKQIKLDSSAQFGYYFRVTCKEEKVLRNNKNFSTVDIQKNGVKFTNSKLTSLNEEYTKNKTEYEEAQDAIVKEIVNISSGYVEPMQTLNDVLAQLDAVVSFAHVSNGAPVPYVRPAILEKGQGRIILKASRHACVEVQDEIAFIPNDVYFEKDKQMFHIITGPNMGGKSTYIRQTGVIVLMAQIGCFVPCESAEVSIVDCILARVGAGDSQLKGVSTFMAEMLETASILRSATKDSLIIIDELGRGTSTYDGFGLAWAISEYIATKIGAFCMFATHFHELTALANQIPTVNNLHVTALTTEETLTMLYQVKKGVCDQSFGIHVAELANFPKHVIECAKQKALELEEFQYIGESQGYDIMEPAAKKCYLEREQGEKIIQEFLSKVKQMPFTEMSEENITIKLKQLKAEVIAKNNSFVNEIISRIKVTT

SEQ ID NO: 397 - protein, 934 aa, Homo sapiens
MAVQPKETLQLESAAEVGFVRFFQGMPEKPTTTVRLFDRGDFYTAHGEDALLAAREVFKTPGVIKYMGPAGAKNLQSVVLSKMNFESFVKDLLLVRQYRVEVYKNRAGNKASKENDWYLAYKASPGNLSQFEDILFGNNDMSASIGVVGVKMSAVDGQRQVGVGYVDSIQRKLGLCEFPDNDQFSNLEALLIQIGPKECVLPGGETAGDMGKLRQIIQRGGILITERKKADFSTKDIYQDLNRLLKGKKGEQMNSAVLPEMENQVAVSSLSAVIKFLELLSDDSNFGQFELTTFDFSQYMKLDIAAVRALNLFQGSVEDTTGSQSLAALLNKCKTPQGQRLVNQWIKQPLMDKNRIEERLNLVEAFVEDAELRQTLQEDLLRRFPDLNRLAKKFQRQAANLQDCYRLYQGINQLPNVIQALEKHEGKHQKLLLAVFVTPLTDLRSDFSKFQEMIETTLDMDQVENHEFLVKPSFDPNLSELREIMNDLEKKMQSTLISAARDLGLDPGKQIKLDSSAQFGYYFRVTCKEEKVLRNNKNFSTVDIQKNGVKFTNSKLTSLNEEYTKNKTEYEEAQDAIVKEIVNISSGYVEPMQTLNDVLAQLDAVVSFAHVSNGAPVPYVRPAILEKGQGRIILKASRHACVEVQDEIAFIPNDVYFEKDKQMFHIITGPNMGGKSTYIRQTGVIVLMAQIGCFVPCESAEVSIVDCILARVGAGDSQLKGVSTFMAEMLETASILRSATKDSLIIIDELGRGTSTYDGFGLAWAISEYIATKIGAFCMFATHFHELTALANQIPTVNNLHVTALTTEETLTMLYQVKKGVCDQSFGIHVAELANFPKHVIECAKQKALELEEFQYIGESQGYDIMEPAAKKCYLEREQGEKIIQEFLSKVKQMPFTEMSEENITIKLKQLKAEVIAKNNSFVNEIISRIKVTT

SEQ ID NO: 398 - protein, 934 aa, Homo sapiens [sequence omitted]

SEQ ID NO: 399 - protein, 934 aa, Homo sapiens [sequence omitted]

SEQ ID NO: 400 - protein, 934 aa, Homo sapiens [sequence omitted]

SEQ ID NO: 401 - protein, 934 aa, Homo sapiens
MAVQPKETLQLESAAEVGFVRFFQGMPEKPTTTVRLFDRGDFYTAHGEDALLAAREVFKTQGVIKYMGPAGAKNLQSVVLSKMNFESFVKDLLLVRQYRVEVYKNRAGNKASKENDWYLAYKASPGNLSQFEDILFGNNDMSASIGVVGVKMSAVDGQRQVGVGYVDSIQRKLGLCEFPDNDQFSNLEALLIQIGPKECVLPGGETAGDMGKLRQIIQRGGILITERKKADFSTKDIYQDLNRLLKGKKGEQMNSAVLPEMENQVAVSSLSAVIKFLELLSDDSNFGQFELTTFDFSQYMKLDIAAVRALNLFQGSVEDTTGCQSLAALLNKCKTPQGQRLVNQWIKQPLMDKNRIEERLNLVEAFVEDAELRQTLQEDLLRRFPDLNRLAKKFQRQAANLQDCYRLYQGINQLPNVIQALEKHEGKHQKLLLAVFVTPLTDLRSDFSKFQEMIETTLDMDQVENHEFLVKPSFDPNLSELREIMNDLEKKMQSTLISAARDLGLDPGKQIKLDSSAQFGYYFRVTCKEEKVLRNNKNFSTVDIQKNGVKFTNSKLTSLNEEYTKNKTEYEEAQDAIVKEIVNISSGYVEPMQTLNDVLAQLDAVVSFAHVSNGAPVPYVRPAILEKGQGRIILKASRHACVEVQDEIAFIPNDVYFEKDKQMFHIITGPNMGGKSTYIRQTGVIVLMAQIGCFVPCESAEVSIVDCILARVGAGDSQLKGVSTFMAEMLETASILRSATKDSLIIIDELGRGTSTYDGFGLAWAISEYIATKIGAFCMFATHFHELTALANQIPTVNNLHVTALTTEETLTMLYQVKKGVCDQSFGIHVAELANFPKHVIECAKQKALELEEFQYIGESQGYDIMEPAAKKCYLEREQGEKIIQEFLSKVKQMPFTEMSEENITIKLKQLKAEVIAKNNSFVNEIISRIKVTT

SEQ ID NO: 402 - protein, 934 aa, Homo sapiens [sequence omitted]

SEQ ID NO: 403 - protein, 934 aa, Homo sapiens
MAVQPKETLQLESAAEVGFVRFFQGMPEKPTTTVRLFDRGDFYTAHGEDALLAAREVFKTQGVIKYMGPAGAKNLQSVVLSKMNFESFVKDLLLVRQYRVEVYKNRAGNKASKENDWYLAYKASPGNLSQFEDILFGNNDMSASIGVVGVKMSAVDGQRQVGVGYVDSIQRKLGLCEFPDNDQFSNLEALLIQIGPKECVLPGGETAGDMGKLRQIIQRGGILITERKKADFSTKDIYQDLNRLLKGKKGEQMNSAVLPEMENQVAVSSLSAVIKFLELLSDDSNFGQFELTTFDFSQYMKLDIAAVRALNLFQGSVEDTTGSQSLAALLNKCKTPQGQRLVNQWIKQPLMDKNRIEERLNLVEAFVEDAELRQTLQEDLLRRFPDLNRVAKKFQRQAANLQDCYRLYQGINQLPNVIQALEKHEGKHQKLLLAVFVTPLTDLRSDFSKFQEMIETTLDMDQVENHEFLVKPSFDPNLSELREIMNDLEKKMQSTLISAARDLGLDPGKQIKLDSSAQFGYYFRVTCKEEKVLRNNKNFSTVDIQKNGVKFTNSKLTSLNEEYTKNKTEYEEAQDAIVKEIVNISSGYVEPMQTLNDVLAQLDAVVSFAHVSNGAPVPYVRPAILEKGQGRIILKASRHACVEVQDEIAFIPNDVYFEKDKQMFHIITGPNMGGKSTYIRQTGVIVLMAQIGCFVPCESAEVSIVDCILARVGAGDSQLKGVSTFMAEMLETASILRSATKDSLIIIDELGRGTSTYDGFGLAWAISEYIATKIGAFCMFATHFHELTALANQIPTVNNLHVTALTTEETLTMLYQVKKGVCDQSFGIHVAELANFPKHVIECAKQKALELEEFQYIGESQGYDIMEPAAKKCYLEREQGEKIIQEFLSKVKQMPFTEMSEENITIKLKQLKAEVIAKNNSFVNEIISRIKVTT

SEQ ID NO: 404 - protein, 934 aa, Homo sapiens
MAVQPKETLQLESAAEVGFVRFFQGMPEKPTTTVRLFDRGDFYTAHGEDALLAAREVFKTQGVIKYMGPAGAKNLQSVVLSKMNFESFVKDLLLVRQYRVEVYKNRAGNKASKENDWYLAYKASPGNLSQFEDILFGNNDMSASIGVVGVKMSAVDGQRQVGVGYVDSIQRKLGLCEFPDNDQFSNLEALLIQIGPKECVLPGGETAGDMGKLRQIIQRGGILITERKKADFSTKDIYQDLNRLLKGKKGEQMNSAVLPEMENQVAVSSLSAVIKFLELLSDDSNFGQFELTTFDFSQYMKLDIAAVRALNLFQGSVEDTTGSQSLAALLNKCKTPQGQRLVNQWIKQPLMDKNRIEERLNLVEAFVEDAELRQTLQEDLLRRFPDLNRLAKKFQRQAANLQDCYRLYQGINQLPNVIQALEKHEGKHQKLLLAVFVTPLTDLRSDFSKFQEMIETTLDMDQVENHEFLVKPSFDPNLSELREIMNDLEKKMQSTLISAARDLGLDPGKQIKLDSSAQFGYYFRVTCKEEKVLRNNKNFSTVDIQKNGVKFTNSKLTSLNEEYTKNKTEYEEAQDAIVKEIVNISSGYVEPMQTLNDVLAQLDAVVSFAHVSNGAPVPYVRPAILEKGQGRIILKASRHACVEVQDEIAFIPNDVYFEKDKQMFHIITGPNMGGKSTYIRQTVVIVLMAQIGCFVPCESAEVSIVDCILARVGAGDSQLKGVSTFMAEMLETASILRSATKDSLIIIDELGRGTSTYDGFGLAWAISEYIATKIGAFCMFATHFHELTALANQIPTVNNLHVTALTTEETLTMLYQVKKGVCDQSFGIHVAELANFPKHVIECAKQKALELEEFQYIGESQGYDIMEPAAKKCYLEREQGEKIIQEFLSKVKQMPFTEMSEENITIKLKQLKAEVIAKNNSFVNEIISRIKVTT

SEQ ID NO: 405 - protein, 934 aa, Homo sapiens
MAVQPKETLQLESAAEVGFVRFFQGMPEKPTTTVRLFDRGDFYTAHGEDALLAAREVFKTQGVIKYMGPAGAKNLQSVVLSKMNFESFVKDLLLVRQYRVEVYKNRAGNKASKENDWYLAYKASPGNLSQFEDILFGNNDMSASIGVVGVKMSAVDGQRQVGVGYVDSIQRKLGLCEFPDNDQFSNLEALLIQIGPKECVLPGGETAGDMGKLRQIIQRGGILITERKKADFSTKDIYQDLNRLLKGKKGEQMNSAVLPEMENQVAVSSLSAVIKFLELLSDDSNFGQFELTTFDFSQYMKLDIAAVRALNLFQGSVEDTTGSQSLAALLNKCKTPQGQRLVNQWIKQPLMDKNRIEERLNLVEAFVEDAELRQTLQEDLLRRFPDLNRLAKKFQRQAANLQDCYRLYQGINQLPNVIQALEKHEGKHQKLLLAVFVTPLTDLRSDFSKFQEMIETTLDMDQVENHEFLVKPSFDPNLSELREIMNDLEKKMQSTLISAARDLGLDPGKQIKLDSSAQFGYYFRVTCKEEKVLRNNKNFSTVDIQKNGVKFTNSKLTSLNEEYTKNKTEYEEAQDAIVKEIVNISSGYVEPMQTLNDVLAQLDAVVSFAHVSNGAPVPYVRPAILEKGQGRIILKASRHACVEVQDEIAFIPNDVYFEKDKQMFHIITGPNMGGKSTYIRQTGVIVLIAQIGCFVPCESAEVSIVDCILARVGAGDSQLKGVSTFMAEMLETASILRSATKDSLIIIDELGRGTSTYDGFGLAWAISEYIATKIGAFCMFATHFHELTALANQIPTVNNLHVTALTTEETLTMLYQVKKGVCDQSFGIHVAELANFPKHVIECAKQKALELEEFQYIGESQGYDIMEPAAKKCYLEREQGEKIIQEFLSKVKQMPFTEMSEENITIKLKQLKAEVIAKNNSFVNEIISRIKVTT

SEQ ID NO: 406 - protein, 934 aa, Homo sapiens
MAVQPKETLQLESAAEVGFVRFFQGMPEKPTTTVRLFDRGDFYTAHGEDALLAAREVFKTQGVIKYMGPAGAKNLQSVVLSKMNFESFVKDLLLVRQYRVEVYKNRAGNKASKENDWYLAYKASPGNLSQFEDILFGNNDMSASIGVVGVKMSAVDGQRQVGVGYVDSIQRKLGLCEFPDNDQFSNLEALLIQIGPKECVLPGGETAGDMGKLRQIIQRGGILITERKKADFSTKDIYQDLNRLLKGKKGEQMNSAVLPEMENQVAVSSLSAVIKFLELLSDDSNFGQFELTTFDFSQYMKLDIAAVRALNLFQGSVEDTTGSQSLAALLNKCKTPQGQRLVNQWIKQPLMDKNRIEERLNLVEAFVEDAELRQTLQEDLLRRFPDLNRLAKKFQRQAANLQDCYRLYQGINQLPNVIQALEKHEGKHQKLLLAVFVTPLTDLRSDFSKFQEMIETTLDMDQVENHEFLVKPSFDPNLSELREIMNDLEKKMQSTLISAARDLGLDPGKQIKLDSSAQFGYYFRVTCKEEKVLRNNKNFSTVDIQKNGVKFTNSKLTSLNEEYTKNKTEYEEAQDAIVKEIVNISSGYVEPMQTLNDVLAQLDAVVSFAHVSNGAPVPYVRPAILEKGQGRIILKASRHACVEVQDEIAFIPNDVYFEKDKQMFHIITGPNMGGKSTYIRQTGVIVLMAQIGCFVPCESAEVSIVDCILARVGAGDSQLKGVSTFMAEMLETASVLRSATKDSLIIIDELGRGTSTYDGFGLAWAISEYIATKIGAFCMFATHFHELTALANQIPTVNNLHVTALTTEETLTMLYQVKKGVCDQSFGIHVAELANFPKHVIECAKQKALELEEFQYIGESQGYDIMEPAAKKCYLEREQGEKIIQEFLSKVKQMPFTEMSEENITIKLKQLKAEVIAKNNSFVNEIISRIKVTT

SEQ ID NO: 407 - protein, 934 aa, Homo sapiens
MAVQPKETLQLESAAEVGFVRFFQGMPEKPTTTVRLFDRGDFYTAHGEDALLAAREVFKTQGVIKYMGPAGAKNLQSVVLSKMNFESFVKDLLLVRQYRVEVYKNRAGNKASKENDWYLAYKASPGNLSQFEDILFGNNDMSASIGVVGVKMSAVDGQRQVGVGYVDSIQRKLGLCEFPDNDQFSNLEALLIQIGPKECVLPGGETAGDMGKLRQIIQRGGILITERKKADFSTKDIYQDLNRLLKGKKGEQMNSAVLPEMENQVAVSSLSAVIKFLELLSDDSNFGQFELTTFDFSQYMKLDIAAVRALNLFQGSVEDTTGSQSLAALLNKCKTPQGQRLVNQWIKQPLMDKNRIEERLNLVEAFVEDAELRQTLQEDLLRRFPDLNRLAKKFQRQAANLQDCYRLYQGINQLPNVIQALEKHEGKHQKLLLAVFVTPLTDLRSDFSKFQEMIETTLDMDQVENHEFLVKPSFDPNLSELREIMNDLEKKMQSTLISAARDLGLDPGKQIKLDSSAQFGYYFRVTCKEEKVLRNNKNFSTVDIQKNGVKFTNSKLTSLNEEYTKNKTEYEEAQDAIVKEIVNISSGYVEPMQTLNDVLAQLDAVVSFAHVSNGAPVPYVRPAILEKGQGRIILKASRHACVEVQDEIAFIPNDVYFEKDKQMFHIITGPNMGGKSTYIRQTGVIVLMAQIGCFVPCESAEVSIVDCILARVGAGDSQLKGVSTFMAEMLETASILRSATKDSLIIIDELGRGTSTYDGFGLAWAISEYIATKIGAFCMFATHFHELTALANQIPTVNNLHVTALTTEETLTMLYQVKKGVCDQSFGIHVAELANFPKHVIECAEQKALELEEFQYIGESQGYDIMEPAAKKCYLEREQGEKIIQEFLSKVKQMPFTEMSEENITIKLKQLKAEVIAKNNSFVNEIISRIKVTT

SEQ ID NO: 408 - protein, 769 aa, Artificial sequence
  hybrid human-yeast MLH1 protein with single amino acid variation
MSLRIKAHDASVVNKIAAGEIIISPVNALKEMMENSIDAKSTSIQVIVKEGGLKLIQIQDNGTGIRKEDLDIVCERFTTSKLQKFEDLSQIQTYGFRGEALASISHVARVTVTTKVKEDRCAWRVSYAEGKMLESPKPVAGKDGTTILVEDLFFNIPSRLRALRSHNDEYSKILDVVGRYAIHSKDIGFSCKKFGDSNYSLSVKPSYTVQDRIRTVFNKSVASNLITFHISKVEDLNLESVDGKVCNLNFISKKSISLIFFINNRLVTCDLLRRALNSVYSNYLPKGFRPFIYLGIVIDPAAVDVNVHPTKREVRFLSQDEIIEKIANQLHAELSAIDTSRTFKASSISTNKPESLIPFNDTIESDRNRKSLRQAQVVENSYTTANSQLRKAKRQENKLVRIDASQAKITSFLSSSQQFNFEGSSTKRQLSEPKVTNVSHSQEAEKLTLNESEQPRDANTINDNDLKDQPKKKQKLGDYKVPSIADDEKNALPISKDGYIRVPKERVNVNLTSIKKLREKVDDSIHRELTDIFANLNYVGVVDEERRLAAIQHDLKLFLIDYGSVCYELFYQIGLTDFANFGKINLQSTNVSDDIVLYNLLSEFDELNDDASKEKIISKIWDMSSMLNEYYSIELVNDGLDNDLKSVKLKSLPLLLKGYIPSLVKLPFFIYRLGKEVDWEDEQECLDGILREIALLYIPDMVPKVDTLDASLSEDEKAQFINRKEHISSLLEHVLFPCIKRRFLAPRHILKDVVEIANLPDLYKVFERC

SEQ ID NO: 409 - protein, 769 aa, Artificial sequence
  hybrid human-yeast MLH1 protein with single amino acid variation
MSLRIKALDASVVNKFAAGEIIISPVNALKEMMENSIDAKSTSIQVIVKEGGLKLIQIQDNGTGIRKEDLDIVCERFTTSKLQKFEDLSQIQTYGFRGEALASISHVARVTVTTKVKEDRCAWRVSYAEGKMLESPKPVAGKDGTTILVEDLFFNIPSRLRALRSHNDEYSKILDVVGRYAIHSKDIGFSCKKFGDSNYSLSVKPSYTVQDRIRTVFNKSVASNLITFHISKVEDLNLESVDGKVCNLNFISKKSISLIFFINNRLVTCDLLRRALNSVYSNYLPKGFRPFIYLGIVIDPAAVDVNVHPTKREVRFLSQDEIIEKIANQLHAELSAIDTSRTFKASSISTNKPESLIPFNDTIESDRNRKSLRQAQVVENSYTTANSQLRKAKRQENKLVRIDASQAKITSFLSSSQQFNFEGSSTKRQLSEPKVTNVSHSQEAEKLTLNESEQPRDANTINDNDLKDQPKKKQKLGDYKVPSIADDEKNALPISKDGYIRVPKERVNVNLTSIKKLREKVDDSIHRELTDIFANLNYVGVVDEERRLAAIQHDLKLFLIDYGSVCYELFYQIGLTDFANFGKINLQSTNVSDDIVLYNLLSEFDELNDDASKEKIISKIWDMSSMLNEYYSIELVNDGLDNDLKSVKLKSLPLLLKGYIPSLVKLPFFIYRLGKEVDWEDEQECLDGILREIALLYIPDMVPKVDTLDASLSEDEKAQFINRKEHISSLLEHVLFPCIKRRFLAPRHILKDVVEIANLPDLYKVFERC

SEQ ID NO: 410 - protein, 769 aa, Artificial sequence
  hybrid human-yeast MLH1 protein with single amino acid variation
MSLRIKALDASVVNKIAAGEIIISPINALKEMMENSIDAKSTSIQVIVKEGGLKLIQIQDNGTGIRKEDLDIVCERFTTSKLQKFEDLSQIQTYGFRGEALASISHVARVTVTTKVKEDRCAWRVSYAEGKMLESPKPVAGKDGTTILVEDLFFNIPSRLRALRSHNDEYSKILDVVGRYAIHSKDIGFSCKKFGDSNYSLSVKPSYTVQDRIRTVFNKSVASNLITFHISKVEDLNLESVDGKVCNLNFISKKSISLIFFINNRLVTCDLLRRALNSVYSNYLPKGFRPFIYLGIVIDPAAVDVNVHPTKREVRFLSQDEIIEKIANQLHAELSAIDTSRTFKASSISTNKPESLIPFNDTIESDRNRKSLRQAQVVENSYTTANSQLRKAKRQENKLVRIDASQAKITSFLSSSQQFNFEGSSTKRQLSEPKVTNVSHSQEAEKLTLNESEQPRDANTINDNDLKDQPKKKQKLGDYKVPSIADDEKNALPISKDGYIRVPKERVNVNLTSIKKLREKVDDSIHRELTDIFANLNYVGVVDEERRLAAIQHDLKLFLIDYGSVCYELFYQIGLTDFANFGKINLQSTNVSDDIVLYNLLSEFDELNDDASKEKIISKIWDMSSMLNEYYSIELVNDGLDNDLKSVKLKSLPLLLKGYIPSLVKLPFFIYRLGKEVDWEDEQECLDGILREIALLYIPDMVPKVDTLDASLSEDEKAQFINRKEHISSLLEHVLFPCIKRRFLAPRHILKDVVEIANLPDLYKVFERC

SEQ ID NO: 411 - protein, 769 aa, Artificial sequence
  hybrid human-yeast MLH1 protein with single amino acid variation
MSLRIKALDASVVNKIAAGEIIISPVNALKEMMEDSIDAKSTSIQVIVKEGGLKLIQIQDNGTGIRKEDLDIVCERFTTSKLQKFEDLSQIQTYGFRGEALASISHVARVTVTTKVKEDRCAWRVSYAEGKMLESPKPVAGKDGTTILVEDLFFNIPSRLRALRSHNDEYSKILDVVGRYAIHSKDIGFSCKKFGDSNYSLSVKPSYTVQDRIRTVFNKSVASNLITFHISKVEDLNLESVDGKVCNLNFISKKSISLIFFINNRLVTCDLLRRALNSVYSNYLPKGFRPFIYLGIVIDPAAVDVNVHPTKREVRFLSQDEIIEKIANQLHAELSAIDTSRTFKASSISTNKPESLIPFNDTIESDRNRKSLRQAQVVENSYTTANSQLRKAKRQENKLVRIDASQAKITSFLSSSQQFNFEGSSTKRQLSEPKVTNVSHSQEAEKLTLNESEQPRDANTINDNDLKDQPKKKQKLGDYKVPSIADDEKNALPISKDGYIRVPKERVNVNLTSIKKLREKVDDSIHRELTDIFANLNYVGVVDEERRLAAIQHDLKLFLIDYGSVCYELFYQIGLTDFANFGKINLQSTNVSDDIVLYNLLSEFDELNDDASKEKIISKIWDMSSMLNEYYSIELVNDGLDNDLKSVKLKSLPLLLKGYIPSLVKLPFFIYRLGKEVDWEDEQECLDGILREIALLYIPDMVPKVDTLDASLSEDEKAQFINRKEHISSLLEHVLFPCIKRRFLAPRHILKDVVEIANLPDLYKVFERC

SEQ ID NO: 412 - protein, 769 aa, Artificial sequence
  hybrid human-yeast MLH1 protein with single amino acid variation
MSLRIKALDASVVNKIAAGEIIISPVNALKEMMETSIDAKSTSIQVIVKEGGLKLIQIQDNGTGIRKEDLDIVCERFTTSKLQKFEDLSQIQTYGFRGEALASISHVARVTVTTKVKEDRCAWRVSYAEGKMLESPKPVAGKDGTTILVEDLFFNIPSRLRALRSHNDEYSKILDVVGRYAIHSKDIGFSCKKFGDSNYSLSVKPSYTVQDRIRTVFNKSVASNLITFHISKVEDLNLESVDGKVCNLNFISKKSISLIFFINNRLVTCDLLRRALNSVYSNYLPKGFRPFIYLGIVIDPAAVDVNVHPTKREVRFLSQDEIIEKIANQLHAELSAIDTSRTFKASSISTNKPESLIPFNDTIESDRNRKSLRQAQVVENSYTTANSQLRKAKRQENKLVRIDASQAKITSFLSSSQQFNFEGSSTKRQLSEPKVTNVSHSQEAEKLTLNESEQPRDANTINDNDLKDQPKKKQKLGDYKVPSIADDEKNALPISKDGYIRVPKERVNVNLTSIKKLREKVDDSIHRELTDIFANLNYVGVVDEERRLAAIQHDLKLFLIDYGSVCYELFYQIGLTDFANFGKINLQSTNVSDDIVLYNLLSEFDELNDDASKEKIISKIWDMSSMLNEYYSIELVNDGLDNDLKSVKLKSLPLLLKGYIPSLVKLPFFIYRLGKEVDWEDEQECLDGILREIALLYIPDMVPKVDTLDASLSEDEKAQFINRKEHISSLLEHVLFPCIKRRFLAPRHILKDVVEIANLPDLYKVFERC

SEQ ID NO: 413 - protein, 769 aa, Artificial sequence
  hybrid human-yeast MLH1 protein with single amino acid variation
MSLRIKALDASVVNKIAAGEIIISPVNALKEMMENSTDAKSTSIQVIVKEGGLKLIQIQDNGTGIRKEDLDIVCERFTTSKLQKFEDLSQIQTYGFRGEALASISHVARVTVTTKVKEDRCAWRVSYAEGKMLESPKPVAGKDGTTILVEDLFFNIPSRLRALRSHNDEYSKILDVVGRYAIHSKDIGFSCKKFGDSNYSLSVKPSYTVQDRIRTVFNKSVASNLITFHISKVEDLNLESVDGKVCNLNFISKKSISLIFFINNRLVTCDLLRRALNSVYSNYLPKGFRPFIYLGIVIDPAAVDVNVHPTKREVRFLSQDEIIEKIANQLHAELSAIDTSRTFKASSISTNKPESLIPFNDTIESDRNRKSLRQAQVVENSYTTANSQLRKAKRQENKLVRIDASQAKITSFLSSSQQFNFEGSSTKRQLSEPKVTNVSHSQEAEKLTLNESEQPRDANTINDNDLKDQPKKKQKLGDYKVPSIADDEKNALPISKDGYIRVPKERVNVNLTSIKKLREKVDDSIHRELTDIFANLNYVGVVDEERRLAAIQHDLKLFLIDYGSVCYELFYQIGLTDFANFGKINLQSTNVSDDIVLYNLLSEFDELNDDASKEKIISKIWDMSSMLNEYYSIELVNDGLDNDLKSVKLKSLPLLLKGYIPSLVKLPFFIYRLGKEVDWEDEQECLDGILREIALLYIPDMVPKVDTLDASLSEDEKAQFINRKEHISSLLEHVLFPCIKRRFLAPRHILKDVVEIANLPDLYKVFERC

SEQ ID NO: 414 - protein, 769 aa, Artificial sequence
  hybrid human-yeast MLH1 protein with single amino acid variation
MSLRIKALDASVVNKIAAGEIIISPVNALKEMMENSNDAKSTSIQVIVKEGGLKLIQIQDNGTGIRKEDLDIVCERFTTSKLQKFEDLSQIQTYGFRGEALASISHVARVTVTTKVKEDRCAWRVSYAEGKMLESPKPVAGKDGTTILVEDLFFNIPSRLRALRSHNDEYSKILDVVGRYAIHSKDIGFSCKKFGDSNYSLSVKPSYTVQDRIRTVFNKSVASNLITFHISKVEDLNLESVDGKVCNLNFISKKSISLIFFINNRLVTCDLLRRALNSVYSNYLPKGFRPFIYLGIVIDPAAVDVNVHPTKREVRFLSQDEIIEKIANQLHAELSAIDTSRTFKASSISTNKPESLIPFNDTIESDRNRKSLRQAQVVENSYTTANSQLRKAKRQENKLVRIDASQAKITSFLSSSQQFNFEGSSTKRQLSEPKVTNVSHSQEAEKLTLNESEQPRDANTINDNDLKDQPKKKQKLGDYKVPSIADDEKNALPISKDGYIRVPKERVNVNLTSIKKLREKVDDSIHRELTDIFANLNYVGVVDEERRLAAIQHDLKLFLIDYGSVCYELFYQIGLTDFANFGKINLQSTNVSDDIVLYNLLSEFDELNDDASKEKIISKIWDMSSMLNEYYSIELVNDGLDNDLKSVKLKSLPLLLKGYIPSLVKLPFFIYRLGKEVDWEDEQECLDGILREIALLYIPDMVPKVDTLDASLSEDEKAQFINRKEHISSLLEHVLFPCIKRRFLAPRHILKDVVEIANLPDLYKVFERC

SEQ ID NO: 415 - protein, 769 aa, Artificial sequence
  hybrid human-yeast MLH1 protein with single amino acid variation
MSLRIKALDASVVNKIAAGEIIISPVNALKEMMENSIGAKSTSIQVIVKEGGLKLIQIQDNGTGIRKEDLDIVCERFTTSKLQKFEDLSQIQTYGFRGEALASISHVARVTVTTKVKEDRCAWRVSYAEGKMLESPKPVAGKDGTTILVEDLFFNIPSRLRALRSHNDEYSKILDVVGRYAIHSKDIGFSCKKFGDSNYSLSVKPSYTVQDRIRTVFNKSVASNLITFHISKVEDLNLESVDGKVCNLNFISKKSISLIFFINNRLVTCDLLRRALNSVYSNYLPKGFRPFIYLGIVIDPAAVDVNVHPTKREVRFLSQDEIIEKIANQLHAELSAIDTSRTFKASSISTNKPESLIPFNDTIESDRNRKSLRQAQVVENSYTTANSQLRKAKRQENKLVRIDASQAKITSFLSSSQQFNFEGSSTKRQLSEPKVTNVSHSQEAEKLTLNESEQPRDANTINDNDLKDQPKKKQKLGDYKVPSIADDEKNALPISKDGYIRVPKERVNVNLTSIKKLREKVDDSIHRELTDIFANLNYVGVVDEERRLAAIQHDLKLFLIDYGSVCYELFYQIGLTDFANFGKINLQSTNVSDDIVLYNLLSEFDELNDDASKEKIISKIWDMSSMLNEYYSIELVNDGLDNDLKSVKLKSLPLLLKGYIPSLVKLPFFIYRLGKEVDWEDEQECLDGILREIALLYIPDMVPKVDTLDASLSEDEKAQFINRKEHISSLLEHVLFPCIKRRFLAPRHILKDVVEIANLPDLYKVFERC

SEQ ID NO: 416 - protein, 769 aa, Artificial sequence
  hybrid human-yeast MLH1 protein with single amino acid variation
MSLRIKALDASVVNKIAAGEIIISPVNALKEMMENSIDTKSTSIQVIVKEGGLKLIQIQDNGTGIRKEDLDIVCERFTTSKLQKFEDLSQIQTYGFRGEALASISHVARVTVTTKVKEDRCAWRVSYAEGKMLESPKPVAGKDGTTILVEDLFFNIPSRLRALRSHNDEYSKILDVVGRYAIHSKDIGFSCKKFGDSNYSLSVKPSYTVQDRIRTVFNKSVASNLITFHISKVEDLNLESVDGKVCNLNFISKKSISLIFFINNRLVTCDLLRRALNSVYSNYLPKGFRPFIYLGIVIDPAAVDVNVHPTKREVRFLSQDEIIEKIANQLHAELSAIDTSRTFKASSISTNKPESLIPFNDTIESDRNRKSLRQAQVVENSYTTANSQLRKAKRQENKLVRIDASQAKITSFLSSSQQFNFEGSSTKRQLSEPKVTNVSHSQEAEKLTLNESEQPRDANTINDNDLKDQPKKKQKLGDYKVPSIADDEKNALPISKDGYIRVPKERVNVNLTSIKKLREKVDDSIHRELTDIFANLNYVGVVDEERRLAAIQHDLKLFLIDYGSVCYELFYQIGLTDFANFGKINLQSTNVSDDIVLYNLLSEFDELNDDASKEKIISKIWDMSSMLNEYYSIELVNDGLDNDLKSVKLKSLPLLLKGYIPSLVKLPFFIYRLGKEVDWEDEQECLDGILREIALLYIPDMVPKVDTLDASLSEDEKAQFINRKEHISSLLEHVLFPCIKRRFLAPRHILKDVVEIANLPDLYKVFERC

SEQ ID NO: 417 - protein, 769 aa, Artificial sequence
  hybrid human-yeast MLH1 protein with single amino acid variation
MSLRIKALDASVVNKIAAGEIIISPVNALKEMMENSIDEKSTSIQVIVKEGGLKLIQIQDNGTGIRKEDLDIVCERFTTSKLQKFEDLSQIQTYGFRGEALASISHVARVTVTTKVKEDRCAWRVSYAEGKMLESPKPVAGKDGTTILVEDLFFNIPSRLRALRSHNDEYSKILDVVGRYAIHSKDIGFSCKKFGDSNYSLSVKPSYTVQDRIRTVFNKSVASNLITFHISKVEDLNLESVDGKVCNLNFISKKSISLIFFINNRLVTCDLLRRALNSVYSNYLPKGFRPFIYLGIVIDPAAVDVNVHPTKREVRFLSQDEIIEKIANQLHAELSAIDTSRTFKASSISTNKPESLIPFNDTIESDRNRKSLRQAQVVENSYTTANSQLRKAKRQENKLVRIDASQAKITSFLSSSQQFNFEGSSTKRQLSEPKVTNVSHSQEAEKLTLNESEQPRDANTINDNDLKDQPKKKQKLGDYKVPSIADDEKNALPISKDGYIRVPKERVNVNLTSIKKLREKVDDSIHRELTDIFANLNYVGVVDEERRLAAIQHDLKLFLIDYGSVCYELFYQIGLTDFANFGKINLQSTNVSDDIVLYNLLSEFDELNDDASKEKIISKIWDMSSMLNEYYSIELVNDGLDNDLKSVKLKSLPLLLKGYIPSLVKLPFFIYRLGKEVDWEDEQECLDGILREIALLYIPDMVPKVDTLDASLSEDEKAQFINRKEHISSLLEHVLFPCIKRRFLAPRHILKDVVEIANLPDLYKVFERC

SEQ ID NO: 418 - protein, 769 aa, Artificial sequence
  hybrid human-yeast MLH1 protein with single amino acid variation
MSLRIKALDASVVNKIAAGEIIISPVNALKEMMENSIDVKSTSIQVIVKEGGLKLIQIQDNGTGIRKEDLDIVCERFTTSKLQKFEDLSQIQTYGFRGEALASISHVARVTVTTKVKEDRCAWRVSYAEGKMLESPKPVAGKDGTTILVEDLFFNIPSRLRALRSHNDEYSKILDVVGRYAIHSKDIGFSCKKFGDSNYSLSVKPSYTVQDRIRTVFNKSVASNLITFHISKVEDLNLESVDGKVCNLNFISKKSISLIFFINNRLVTCDLLRRALNSVYSNYLPKGFRPFIYLGIVIDPAAVDVNVHPTKREVRFLSQDEIIEKIANQLHAELSAIDTSRTFKASSISTNKPESLIPFNDTIESDRNRKSLRQAQVVENSYTTANSQLRKAKRQENKLVRIDASQAKITSFLSSSQQFNFEGSSTKRQLSEPKVTNVSHSQEAEKLTLNESEQPRDANTINDNDLKDQPKKKQKLGDYKVPSIADDEKNALPISKDGYIRVPKERVNVNLTSIKKLREKVDDSIHRELTDIFANLNYVGVVDEERRLAAIQHDLKLFLIDYGSVCYELFYQIGLTDFANFGKINLQSTNVSDDIVLYNLLSEFDELNDDASKEKIISKIWDMSSMLNEYYSIELVNDGLDNDLKSVKLKSLPLLLKGYIPSLVKLPFFIYRLGKEVDWEDEQECLDGILREIALLYIPDMVPKVDTLDASLSEDEKAQFINRKEHISSLLEHVLFPCIKRRFLAPRHILKDVVEIANLPDLYKVFERC

SEQ ID NO: 419 - protein, 769 aa, Artificial sequence
  hybrid human-yeast MLH1 protein with single amino acid variation
MSLRIKALDASVVNKIAAGEIIISPVNALKEMMENSIDAKFTSIQVIVKEGGLKLIQIQDNGTGIRKEDLDIVCERFTTSKLQKFEDLSQIQTYGFRGEALASISHVARVTVTTKVKEDRCAWRVSYAEGKMLESPKPVAGKDGTTILVEDLFFNIPSRLRALRSHNDEYSKILDVVGRYAIHSKDIGFSCKKFGDSNYSLSVKPSYTVQDRIRTVFNKSVASNLITFHISKVEDLNLESVDGKVCNLNFISKKSISLIFFINNRLVTCDLLRRALNSVYSNYLPKGFRPFIYLGIVIDPAAVDVNVHPTKREVRFLSQDEIIEKIANQLHAELSAIDTSRTFKASSISTNKPESLIPFNDTIESDRNRKSLRQAQVVENSYTTANSQLRKAKRQENKLVRIDASQAKITSFLSSSQQFNFEGSSTKRQLSEPKVTNVSHSQEAEKLTLNESEQPRDANTINDNDLKDQPKKKQKLGDYKVPSIADDEKNALPISKDGYIRVPKERVNVNLTSIKKLREKVDDSIHRELTDIFANLNYVGVVDEERRLAAIQHDLKLFLIDYGSVCYELFYQIGLTDFANFGKINLQSTNVSDDIVLYNLLSEFDELNDDASKEKIISKIWDMSSMLNEYYSIELVNDGLDNDLKSVKLKSLPLLLKGYIPSLVKLPFFIYRLGKEVDWEDEQECLDGILREIALLYIPDMVPKVDTLDASLSEDEKAQFINRKEHISSLLEHVLFPCIKRRFLAPRHILKDVVEIANLPDLYKVFERC

SEQ ID NO: 420 - protein, 769 aa, Artificial sequence
  hybrid human-yeast MLH1 protein with single amino acid variation
MSLRIKALDASVVNKIAAGEIIISPVNALKEMMENSIDAKSISIQVIVKEGGLKLIQIQDNGTGIRKEDLDIVCERFTTSKLQKFEDLSQIQTYGFRGEALASISHVARVTVTTKVKEDRCAWRVSYAEGKMLESPKPVAGKDGTTILVEDLFFNIPSRLRALRSHNDEYSKILDVVGRYAIHSKDIGFSCKKFGDSNYSLSVKPSYTVQDRIRTVFNKSVASNLITFHISKVEDLNLESVDGKVCNLNFISKKSISLIFFINNRLVTCDLLRRALNSVYSNYLPKGFRPFIYLGIVIDPAAVDVNVHPTKREVRFLSQDEIIEKIANQLHAELSAIDTSRTFKASSISTNKPESLIPFNDTIESDRNRKSLRQAQVVENSYTTANSQLRKAKRQENKLVRIDASQAKITSFLSSSQQFNFEGSSTKRQLSEPKVTNVSHSQEAEKLTLNESEQPRDANTINDNDLKDQPKKKQKLGDYKVPSIADDEKNALPISKDGYIRVPKERVNVNLTSIKKLREKVDDSIHRELTDIFANLNYVGVVDEERRLAAIQHDLKLFLIDYGSVCYELFYQIGLTDFANFGKINLQSTNVSDDIVLYNLLSEFDELNDDASKEKIISKIWDMSSMLNEYYSIELVNDGLDNDLKSVKLKSLPLLLKGYIPSLVKLPFFIYRLGKEVDWEDEQECLDGILREIALLYIPDMVPKVDTLDASLSEDEKAQFINRKEHISSLLEHVLFPCIKRRFLAPRHILKDVVEIANLPDLYKVFERC

SEQ ID NO: 421 - protein, 769 aa, Artificial sequence
  hybrid human-yeast MLH1 protein with single amino acid variation
MSLRIKALDASVVNKIAAGEIIISPVNALKEMMENSIDAKSTTIQVIVKEGGLKLIQIQDNGTGIRKEDLDIVCERFTTSKLQKFEDLSQIQTYGFRGEALASISHVARVTVTTKVKEDRCAWRVSYAEGKMLESPKPVAGKDGTTILVEDLFFNIPSRLRALRSHNDEYSKILDVVGRYAIHSKDIGFSCKKFGDSNYSLSVKPSYTVQDRIRTVFNKSVASNLITFHISKVEDLNLESVDGKVCNLNFISKKSISLIFFINNRLVTCDLLRRALNSVYSNYLPKGFRPFIYLGIVIDPAAVDVNVHPTKREVRFLSQDEIIEKIANQLHAELSAIDTSRTFKASSISTNKPESLIPFNDTIESDRNRKSLRQAQVVENSYTTANSQLRKAKRQENKLVRIDASQAKITSFLSSSQQFNFEGSSTKRQLSEPKVTNVSHSQEAEKLTLNESEQPRDANTINDNDLKDQPKKKQKLGDYKVPSIADDEKNALPISKDGYIRVPKERVNVNLTSIKKLREKVDDSIHRELTDIFANLNYVGVVDEERRLAAIQHDLKLFLIDYGSVCYELFYQIGLTDFANFGKINLQSTNVSDDIVLYNLLSEFDELNDDASKEKIISKIWDMSSMLNEYYSIELVNDGLDNDLKSVKLKSLPLLLKGYIPSLVKLPFFIYRLGKEVDWEDEQECLDGILREIALLYIPDMVPKVDTLDASLSEDEKAQFINRKEHISSLLEHVLFPCIKRRFLAPRHILKDVVEIANLPDLYKVFERC

SEQ ID NO: 422 - protein, 769 aa, Artificial sequence
  hybrid human-yeast MLH1 protein with single amino acid variation
MSLRIKALDASVVNKIAAGEIIISPVNALKEMMENSIDAKSTSTQVIVKEGGLKLIQIQDNGTGIRKEDLDIVCERFTTSKLQKFEDLSQIQTYGFRGEALASISHVARVTVTTKVKEDRCAWRVSYAEGKMLESPKPVAGKDGTTILVEDLFFNIPSRLRALRSHNDEYSKILDVVGRYAIHSKDIGFSCKKFGDSNYSLSVKPSYTVQDRIRTVFNKSVASNLITFHISKVEDLNLESVDGKVCNLNFISKKSISLIFFINNRLVTCDLLRRALNSVYSNYLPKGFRPFIYLGIVIDPAAVDVNVHPTKREVRFLSQDEIIEKIANQLHAELSAIDTSRTFKASSISTNKPESLIPFNDTIESDRNRKSLRQAQVVENSYTTANSQLRKAKRQENKLVRIDASQAKITSFLSSSQQFNFEGSSTKRQLSEPKVTNVSHSQEAEKLTLNESEQPRDANTINDNDLKDQPKKKQKLGDYKVPSIADDEKNALPISKDGYIRVPKERVNVNLTSIKKLREKVDDSIHRELTDIFANLNYVGVVDEERRLAAIQHDLKLFLIDYGSVCYELFYQIGLTDFANFGKINLQSTNVSDDIVLYNLLSEFDELNDDASKEKIISKIWDMSSMLNEYYSIELVNDGLDNDLKSVKLKSLPLLLKGYIPSLVKLPFFIYRLGKEVDWEDEQECLDGILREIALLYIPDMVPKVDTLDASLSEDEKAQFINRKEHISSLLEHVLFPCIKRRFLAPRHILKDVVEIANLPDLYKVFERC

SEQ ID NO: 423 - protein, 769 aa, Artificial sequence
  hybrid human-yeast MLH1 protein with single amino acid variation
MSLRIKALDASVVNKIAAGEIIISPVNALKEMMENSIDAKSTSSQVIVKEGGLKLIQIQDNGTGIRKEDLDIVCERFTTSKLQKFEDLSQIQTYGFRGEALASISHVARVTVTTKVKEDRCAWRVSYAEGKMLESPKPVAGKDGTTILVEDLFFNIPSRLRALRSHNDEYSKILDVVGRYAIHSKDIGFSCKKFGDSNYSLSVKPSYTVQDRIRTVFNKSVASNLITFHISKVEDLNLESVDGKVCNLNFISKKSISLIFFINNRLVTCDLLRRALNSVYSNYLPKGFRPFIYLGIVIDPAAVDVNVHPTKREVRFLSQDEIIEKIANQLHAELSAIDTSRTFKASSISTNKPESLIPFNDTIESDRNRKSLRQAQVVENSYTTANSQLRKAKRQENKLVRIDASQAKITSFLSSSQQFNFEGSSTKRQLSEPKVTNVSHSQEAEKLTLNESEQPRDANTINDNDLKDQPKKKQKLGDYKVPSIADDEKNALPISKDGYIRVPKERVNVNLTSIKKLREKVDDSIHRELTDIFANLNYVGVVDEERRLAAIQHDLKLFLIDYGSVCYELFYQIGLTDFANFGKINLQSTNVSDDIVLYNLLSEFDELNDDASKEKIISKIWDMSSMLNEYYSIELVNDGLDNDLKSVKLKSLPLLLKGYIPSLVKLPFFIYRLGKEVDWEDEQECLDGILREIALLYIPDMVPKVDTLDASLSEDEKAQFINRKEHISSLLEHVLFPCIKRRFLAPRHILKDVVEIANLPDLYKVFERC

SEQ ID NO: 424 - protein, 769 aa, Artificial sequence
  hybrid human-yeast MLH1 protein with single amino acid variation
MSLRIKALDASVVNKIAAGEIIISPVNALKEMMENSIDAKSTSIYVIVKEGGLKLIQIQDNGTGIRKEDLDIVCERFTTSKLQKFEDLSQIQTYGFRGEALASISHVARVTVTTKVKEDRCAWRVSYAEGKMLESPKPVAGKDGTTILVEDLFFNIPSRLRALRSHNDEYSKILDVVGRYAIHSKDIGFSCKKFGDSNYSLSVKPSYTVQDRIRTVFNKSVASNLITFHISKVEDLNLESVDGKVCNLNFISKKSISLIFFINNRLVTCDLLRRALNSVYSNYLPKGFRPFIYLGIVIDPAAVDVNVHPTKREVRFLSQDEIIEKIANQLHAELSAIDTSRTFKASSISTNKPESLIPFNDTIESDRNRKSLRQAQVVENSYTTANSQLRKAKRQENKLVRIDASQAKITSFLSSSQQFNFEGSSTKRQLSEPKVTNVSHSQEAEKLTLNESEQPRDANTINDNDLKDQPKKKQKLGDYKVPSIADDEKNALPISKDGYIRVPKERVNVNLTSIKKLREKVDDSIHRELTDIFANLNYVGVVDEERRLAAIQHDLKLFLIDYGSVCYELFYQIGLTDFANFGKINLQSTNVSDDIVLYNLLSEFDELNDDASKEKIISKIWDMSSMLNEYYSIELVNDGLDNDLKSVKLKSLPLLLKGYIPSLVKLPFFIYRLGKEVDWEDEQECLDGILREIALLYIPDMVPKVDTLDASLSEDEKAQFINRKEHISSLLEHVLFPCIKRRFLAPRHILKDVVEIANLPDLYKVFERC

SEQ ID NO: 425 - protein, 769 aa, Artificial sequence
  hybrid human-yeast MLH1 protein with single amino acid variation
MSLRIKALDASVVNKIAAGEIIISPVNALKEMMENSIDAKSTSIQEIVKEGGLKLIQIQDNGTGIRKEDLDIVCERFTTSKLQKFEDLSQIQTYGFRGEALASISHVARVTVTTKVKEDRCAWRVSYAEGKMLESPKPVAGKDGTTILVEDLFFNIPSRLRALRSHNDEYSKILDVVGRYAIHSKDIGFSCKKFGDSNYSLSVKPSYTVQDRIRTVFNKSVASNLITFHISKVEDLNLESVDGKVCNLNFISKKSISLIFFINNRLVTCDLLRRALNSVYSNYLPKGFRPFIYLGIVIDPAAVDVNVHPTKREVRFLSQDEIIEKIANQLHAELSAIDTSRTFKASSISTNKPESLIPFNDTIESDRNRKSLRQAQVVENSYTTANSQLRKAKRQENKLVRIDASQAKITSFLSSSQQFNFEGSSTKRQLSEPKVTNVSHSQEAEKLTLNESEQPRDANTINDNDLKDQPKKKQKLGDYKVPSIADDEKNALPISKDGYIRVPKERVNVNLTSIKKLREKVDDSIHRELTDIFANLNYVGVVDEERRLAAIQHDLKLFLIDYGSVCYELFYQIGLTDFANFGKINLQSTNVSDDIVLYNLLSEFDELNDDASKEKIISKIWDMSSMLNEYYSIELVNDGLDNDLKSVKLKSLPLLLKGYIPSLVKLPFFIYRLGKEVDWEDEQECLDGILREIALLYIPDMVPKVDTLDASLSEDEKAQFINRKEHISSLLEHVLFPCIKRRFLAPRHILKDVVEIANLPDLYKVFERC

SEQ ID NO: 426 - protein, 769 aa, Artificial sequence
  hybrid human-yeast MLH1 protein with single amino acid variation
MSLRIKALDASVVNKIAAGEIIISPVNALKEMMENSIDAKSTSIQMIVKEGGLKLIQIQDNGTGIRKEDLDIVCERFTTSKLQKFEDLSQIQTYGFRGEALASISHVARVTVTTKVKEDRCAWRVSYAEGKMLESPKPVAGKDGTTILVEDLFFNIPSRLRALRSHNDEYSKILDVVGRYAIHSKDIGFSCKKFGDSNYSLSVKPSYTVQDRIRTVFNKSVASNLITFHISKVEDLNLESVDGKVCNLNFISKKSISLIFFINNRLVTCDLLRRALNSVYSNYLPKGFRPFIYLGIVIDPAAVDVNVHPTKREVRFLSQDEIIEKIANQLHAELSAIDTSRTFKASSISTNKPESLIPFNDTIESDRNRKSLRQAQVVENSYTTANSQLRKAKRQENKLVRIDASQAKITSFLSSSQQFNFEGSSTKRQLSEPKVTNVSHSQEAEKLTLNESEQPRDANTINDNDLKDQPKKKQKLGDYKVPSIADDEKNALPISKDGYIRVPKERVNVNLTSIKKLREKVDDSIHRELTDIFANLNYVGVVDEERRLAAIQHDLKLFLIDYGSVCYELFYQIGLTDFANFGKINLQSTNVSDDIVLYNLLSEFDELNDDASKEKIISKIWDMSSMLNEYYSIELVNDGLDNDLKSVKLKSLPLLLKGYIPSLVKLPFFIYRLGKEVDWEDEQECLDGILREIALLYIPDMVPKVDTLDASLSEDEKAQFINRKEHISSLLEHVLFPCIKRRFLAPRHILKDVVEIANLPDLYKVFERC

SEQ ID NO: 427 - protein, 769 aa, Artificial sequence
  hybrid human-yeast MLH1 protein with single amino acid variation
MSLRIKALDASVVNKIAAGEIIISPVNALKEMMENSIDAKSTSIQAIVKEGGLKLIQIQDNGTGIRKEDLDIVCERFTTSKLQKFEDLSQIQTYGFRGEALASISHVARVTVTTKVKEDRCAWRVSYAEGKMLESPKPVAGKDGTTILVEDLFFNIPSRLRALRSHNDEYSKILDVVGRYAIHSKDIGFSCKKFGDSNYSLSVKPSYTVQDRIRTVFNKSVASNLITFHISKVEDLNLESVDGKVCNLNFISKKSISLIFFINNRLVTCDLLRRALNSVYSNYLPKGFRPFIYLGIVIDPAAVDVNVHPTKREVRFLSQDEIIEKIANQLHAELSAIDTSRTFKASSISTNKPESLIPFNDTIESDRNRKSLRQAQVVENSYTTANSQLRKAKRQENKLVRIDASQAKITSFLSSSQQFNFEGSSTKRQLSEPKVTNVSHSQEAEKLTLNESEQPRDANTINDNDLKDQPKKKQKLGDYKVPSIADDEKNALPISKDGYIRVPKERVNVNLTSIKKLREKVDDSIHRELTDIFANLNYVGVVDEERRLAAIQHDLKLFLIDYGSVCYELFYQIGLTDFANFGKINLQSTNVSDDIVLYNLLSEFDELNDDASKEKIISKIWDMSSMLNEYYSIELVNDGLDNDLKSVKLKSLPLLLKGYIPSLVKLPFFIYRLGKEVDWEDEQECLDGILREIALLYIPDMVPKVDTLDASLSEDEKAQFINRKEHISSLLEHVLFPCIKRRFLAPRHILKDVVEIANLPDLYKVFERC

SEQ ID NO: 428 - protein, 769 aa, Artificial sequence
  hybrid human-yeast MLH1 protein with single amino acid variation
MSLRIKALDASVVNKIAAGEIIISPVNALKEMMENSIDAKSTSIQVIDKEGGLKLIQIQDNGTGIRKEDLDIVCERFTTSKLQKFEDLSQIQTYGFRGEALASISHVARVTVTTKVKEDRCAWRVSYAEGKMLESPKPVAGKDGTTILVEDLFFNIPSRLRALRSHNDEYSKILDVVGRYAIHSKDIGFSCKKFGDSNYSLSVKPSYTVQDRIRTVFNKSVASNLITFHISKVEDLNLESVDGKVCNLNFISKKSISLIFFINNRLVTCDLLRRALNSVYSNYLPKGFRPFIYLGIVIDPAAVDVNVHPTKREVRFLSQDEIIEKIANQLHAELSAIDTSRTFKASSISTNKPESLIPFNDTIESDRNRKSLRQAQVVENSYTTANSQLRKAKRQENKLVRIDASQAKITSFLSSSQQFNFEGSSTKRQLSEPKVTNVSHSQEAEKLTLNESEQPRDANTINDNDLKDQPKKKQKLGDYKVPSIADDEKNALPISKDGYIRVPKERVNVNLTSIKKLREKVDDSIHRELTDIFANLNYVGVVDEERRLAAIQHDLKLFLIDYGSVCYELFYQIGLTDFANFGKINLQSTNVSDDIVLYNLLSEFDELNDDASKEKIISKIWDMSSMLNEYYSIELVNDGLDNDLKSVKLKSLPLLLKGYIPSLVKLPFFIYRLGKEVDWEDEQECLDGILREIALLYIPDMVPKVDTLDASLSEDEKAQFINRKEHISSLLEHVLFPCIKRRFLAPRHILKDVVEIANLPDLYKVFERC

SEQ ID NO: 429 - protein, 769 aa, Artificial sequence
  hybrid human-yeast MLH1 protein with single amino acid variation
MSLRIKALDASVVNKIAAGEIIISPVNALKEMMENSIDAKSTSIQVIAKEGGLKLIQIQDNGTGIRKEDLDIVCERFTTSKLQKFEDLSQIQTYGFRGEALASISHVARVTVTTKVKEDRCAWRVSYAEGKMLESPKPVAGKDGTTILVEDLFFNIPSRLRALRSHNDEYSKILDVVGRYAIHSKDIGFSCKKFGDSNYSLSVKPSYTVQDRIRTVFNKSVASNLITFHISKVEDLNLESVDGKVCNLNFISKKSISLIFFINNRLVTCDLLRRALNSVYSNYLPKGFRPFIYLGIVIDPAAVDVNVHPTKREVRFLSQDEIIEKIANQLHAELSAIDTSRTFKASSISTNKPESLIPFNDTIESDRNRKSLRQAQVVENSYTTANSQLRKAKRQENKLVRIDASQAKITSFLSSSQQFNFEGSSTKRQLSEPKVTNVSHSQEAEKLTLNESEQPRDANTINDNDLKDQPKKKQKLGDYKVPSIADDEKNALPISKDGYIRVPKERVNVNLTSIKKLREKVDDSIHRELTDIFANLNYVGVVDEERRLAAIQHDLKLFLIDYGSVCYELFYQIGLTDFANFGKINLQSTNVSDDIVLYNLLSEFDELNDDASKEKIISKIWDMSSMLNEYYSIELVNDGLDNDLKSVKLKSLPLLLKGYIPSLVKLPFFIYRLGKEVDWEDEQECLDGILREIALLYIPDMVPKVDTLDASLSEDEKAQFINRKEHISSLLEHVLFPCIKRRFLAPRHILKDVVEIANLPDLYKVFERC

SEQ ID NO: 430 - protein, 769 aa, Artificial sequence
  hybrid human-yeast MLH1 protein with single amino acid variation
MSLRIKALDASVVNKIAAGEIIISPVNALKEMMENSIDAKSTSIQVIVIEGGLKLIQIQDNGTGIRKEDLDIVCERFTTSKLQKFEDLSQIQTYGFRGEALASISHVARVTVTTKVKEDRCAWRVSYAEGKMLESPKPVAGKDGTTILVEDLFFNIPSRLRALRSHNDEYSKILDVVGRYAIHSKDIGFSCKKFGDSNYSLSVKPSYTVQDRIRTVFNKSVASNLITFHISKVEDLNLESVDGKVCNLNFISKKSISLIFFINNRLVTCDLLRRALNSVYSNYLPKGFRPFIYLGIVIDPAAVDVNVHPTKREVRFLSQDEIIEKIANQLHAELSAIDTSRTFKASSISTNKPESLIPFNDTIESDRNRKSLRQAQVVENSYTTANSQLRKAKRQENKLVRIDASQAKITSFLSSSQQFNFEGSSTKRQLSEPKVTNVSHSQEAEKLTLNESEQPRDANTINDNDLKDQPKKKQKLGDYKVPSIADDEKNALPISKDGYIRVPKERVNVNLTSIKKLREKVDDSIHRELTDIFANLNYVGVVDEERRLAAIQHDLKLFLIDYGSVCYELFYQIGLTDFANFGKINLQSTNVSDDIVLYNLLSEFDELNDDASKEKIISKIWDMSSMLNEYYSIELVNDGLDNDLKSVKLKSLPLLLKGYIPSLVKLPFFIYRLGKEVDWEDEQECLDGILREIALLYIPDMVPKVDTLDASLSEDEKAQFINRKEHISSLLEHVLFPCIKRRFLAPRHILKDVVEIANLPDLYKVFERC

SEQ ID NO: 431 - protein, 769 aa, Artificial sequence
  hybrid human-yeast MLH1 protein with single amino acid variation
MSLRIKALDASVVNKIAAGEIIISPVNALKEMMENSIDAKSTSIQVIVKVGGLKLIQIQDNGTGIRKEDLDIVCERFTTSKLQKFEDLSQIQTYGFRGEALASISHVARVTVTTKVKEDRCAWRVSYAEGKMLESPKPVAGKDGTTILVEDLFFNIPSRLRALRSHNDEYSKILDVVGRYAIHSKDIGFSCKKFGDSNYSLSVKPSYTVQDRIRTVFNKSVASNLITFHISKVEDLNLESVDGKVCNLNFISKKSISLIFFINNRLVTCDLLRRALNSVYSNYLPKGFRPFIYLGIVIDPAAVDVNVHPTKREVRFLSQDEIIEKIANQLHAELSAIDTSRTFKASSISTNKPESLIPFNDTIESDRNRKSLRQAQVVENSYTTANSQLRKAKRQENKLVRIDASQAKITSFLSSSQQFNFEGSSTKRQLSEPKVTNVSHSQEAEKLTLNESEQPRDANTINDNDLKDQPKKKQKLGDYKVPSIADDEKNALPISKDGYIRVPKERVNVNLTSIKKLREKVDDSIHRELTDIFANLNYVGVVDEERRLAAIQHDLKLFLIDYGSVCYELFYQIGLTDFANFGKINLQSTNVSDDIVLYNLLSEFDELNDDASKEKIISKIWDMSSMLNEYYSIELVNDGLDNDLKSVKLKSLPLLLKGYIPSLVKLPFFIYRLGKEVDWEDEQECLDGILREIALLYIPDMVPKVDTLDASLSEDEKAQFINRKEHISSLLEHVLFPCIKRRFLAPRHILKDVVEIANLPDLYKVFERC

SEQ ID NO: 432 - protein, 769 aa, Artificial sequence
  hybrid human-yeast MLH1 protein with single amino acid variation
MSLRIKALDASVVNKIAAGEIIISPVNALKEMMENSIDAKSTSIQVIVKERGLKLIQIQDNGTGIRKEDLDIVCERFTTSKLQKFEDLSQIQTYGFRGEALASISHVARVTVTTKVKEDRCAWRVSYAEGKMLESPKPVAGKDGTTILVEDLFFNIPSRLRALRSHNDEYSKILDVVGRYAIHSKDIGFSCKKFGDSNYSLSVKPSYTVQDRIRTVFNKSVASNLITFHISKVEDLNLESVDGKVCNLNFISKKSISLIFFINNRLVTCDLLRRALNSVYSNYLPKGFRPFIYLGIVIDPAAVDVNVHPTKREVRFLSQDEIIEKIANQLHAELSAIDTSRTFKASSISTNKPESLIPFNDTIESDRNRKSLRQAQVVENSYTTANSQLRKAKRQENKLVRIDASQAKITSFLSSSQQFNFEGSSTKRQLSEPKVTNVSHSQEAEKLTLNESEQPRDANTINDNDLKDQPKKKQKLGDYKVPSIADDEKNALPISKDGYIRVPKERVNVNLTSIKKLREKVDDSIHRELTDIFANLNYVGVVDEERRLAAIQHDLKLFLIDYGSVCYELFYQIGLTDFANFGKINLQSTNVSDDIVLYNLLSEFDELNDDASKEKIISKIWDMSSMLNEYYSIELVNDGLDNDLKSVKLKSLPLLLKGYIPSLVKLPFFIYRLGKEVDWEDEQECLDGILREIALLYIPDMVPKVDTLDASLSEDEKAQFINRKEHISSLLEHVLFPCIKRRFLAPRHILKDVVEIANLPDLYKVFERC

SEQ ID NO: 433 - protein, 769 aa, Artificial sequence
  hybrid human-yeast MLH1 protein with single amino acid variation
MSLRIKALDASVVNKIAAGEIIISPVNALKEMMENSIDAKSTSIQVIVKEGDLKLIQIQDNGTGIRKEDLDIVCERFTTSKLQKFEDLSQIQTYGFRGEALASISHVARVTVTTKVKEDRCAWRVSYAEGKMLESPKPVAGKDGTTILVEDLFFNIPSRLRALRSHNDEYSKILDVVGRYAIHSKDIGFSCKKFGDSNYSLSVKPSYTVQDRIRTVFNKSVASNLITFHISKVEDLNLESVDGKVCNLNFISKKSISLIFFINNRLVTCDLLRRALNSVYSNYLPKGFRPFIYLGIVIDPAAVDVNVHPTKREVRFLSQDEIIEKIANQLHAELSAIDTSRTFKASSISTNKPESLIPFNDTIESDRNRKSLRQAQVVENSYTTANSQLRKAKRQENKLVRIDASQAKITSFLSSSQQFNFEGSSTKRQLSEPKVTNVSHSQEAEKLTLNESEQPRDANTINDNDLKDQPKKKQKLGDYKVPSIADDEKNALPISKDGYIRVPKERVNVNLTSIKKLREKVDDSIHRELTDIFANLNYVGVVDEERRLAAIQHDLKLFLIDYGSVCYELFYQIGLTDFANFGKINLQSTNVSDDIVLYNLLSEFDELNDDASKEKIISKIWDMSSMLNEYYSIELVNDGLDNDLKSVKLKSLPLLLKGYIPSLVKLPFFIYRLGKEVDWEDEQECLDGILREIALLYIPDMVPKVDTLDASLSEDEKAQFINRKEHISSLLEHVLFPCIKRRFLAPRHILKDVVEIANLPDLYKVFERC

SEQ ID NO: 434 - protein, 769 aa, Artificial sequence
  hybrid human-yeast MLH1 protein with single amino acid variation
MSLRIKALDASVVNKIAAGEIIISPVNALKEMMENSIDAKSTSIQVIVKEGSLKLIQIQDNGTGIRKEDLDIVCERFTTSKLQKFEDLSQIQTYGFRGEALASISHVARVTVTTKVKEDRCAWRVSYAEGKMLESPKPVAGKDGTTILVEDLFFNIPSRLRALRSHNDEYSKILDVVGRYAIHSKDIGFSCKKFGDSNYSLSVKPSYTVQDRIRTVFNKSVASNLITFHISKVEDLNLESVDGKVCNLNFISKKSISLIFFINNRLVTCDLLRRALNSVYSNYLPKGFRPFIYLGIVIDPAAVDVNVHPTKREVRFLSQDEIIEKIANQLHAELSAIDTSRTFKASSISTNKPESLIPFNDTIESDRNRKSLRQAQVVENSYTTANSQLRKAKRQENKLVRIDASQAKITSFLSSSQQFNFEGSSTKRQLSEPKVTNVSHSQEAEKLTLNESEQPRDANTINDNDLKDQPKKKQKLGDYKVPSIADDEKNALPISKDGYIRVPKERVNVNLTSIKKLREKVDDSIHRELTDIFANLNYVGVVDEERRLAAIQHDLKLFLIDYGSVCYELFYQIGLTDFANFGKINLQSTNVSDDIVLYNLLSEFDELNDDASKEKIISKIWDMSSMLNEYYSIELVNDGLDNDLKSVKLKSLPLLLKGYIPSLVKLPFFIYRLGKEVDWEDEQECLDGILREIALLYIPDMVPKVDTLDASLSEDEKAQFINRKEHISSLLEHVLFPCIKRRFLAPRHILKDVVEIANLPDLYKVFERC

SEQ ID NO: 435 - protein, 769 aa, Artificial sequence
  hybrid human-yeast MLH1 protein with single amino acid variation
MSLRIKALDASVVNKIAAGEIIISPVNALKEMMENSIDAKSTSIQVIVKEGGMKLIQIQDNGTGIRKEDLDIVCERFTTSKLQKFEDLSQIQTYGFRGEALASISHVARVTVTTKVKEDRCAWRVSYAEGKMLESPKPVAGKDGTTILVEDLFFNIPSRLRALRSHNDEYSKILDVVGRYAIHSKDIGFSCKKFGDSNYSLSVKPSYTVQDRIRTVFNKSVASNLITFHISKVEDLNLESVDGKVCNLNFISKKSISLIFFINNRLVTCDLLRRALNSVYSNYLPKGFRPFIYLGIVIDPAAVDVNVHPTKREVRFLSQDEIIEKIANQLHAELSAIDTSRTFKASSISTNKPESLIPFNDTIESDRNRKSLRQAQVVENSYTTANSQLRKAKRQENKLVRIDASQAKITSFLSSSQQFNFEGSSTKRQLSEPKVTNVSHSQEAEKLTLNESEQPRDANTINDNDLKDQPKKKQKLGDYKVPSIADDEKNALPISKDGYIRVPKERVNVNLTSIKKLREKVDDSIHRELTDIFANLNYVGVVDEERRLAAIQHDLKLFLIDYGSVCYELFYQIGLTDFANFGKINLQSTNVSDDIVLYNLLSEFDELNDDASKEKIISKIWDMSSMLNEYYSIELVNDGLDNDLKSVKLKSLPLLLKGYIPSLVKLPFFIYRLGKEVDWEDEQECLDGILREIALLYIPDMVPKVDTLDASLSEDEKAQFINRKEHISSLLEHVLFPCIKRRFLAPRHILKDVVEIANLPDLYKVFERC

SEQ ID NO: 436 - protein, 769 aa, Artificial sequence
  hybrid human-yeast MLH1 protein with single amino acid variation
MSLRIKALDASVVNKIAAGEIIISPVNALKEMMENSIDAKSTSIQVIVKEGGPKLIQIQDNGTGIRKEDLDIVCERFTTSKLQKFEDLSQIQTYGFRGEALASISHVARVTVTTKVKEDRCAWRVSYAEGKMLESPKPVAGKDGTTILVEDLFFNIPSRLRALRSHNDEYSKILDVVGRYAIHSKDIGFSCKKFGDSNYSLSVKPSYTVQDRIRTVFNKSVASNLITFHISKVEDLNLESVDGKVCNLNFISKKSISLIFFINNRLVTCDLLRRALNSVYSNYLPKGFRPFIYLGIVIDPAAVDVNVHPTKREVRFLSQDEIIEKIANQLHAELSAIDTSRTFKASSISTNKPESLIPFNDTIESDRNRKSLRQAQVVENSYTTANSQLRKAKRQENKLVRIDASQAKITSFLSSSQQFNFEGSSTKRQLSEPKVTNVSHSQEAEKLTLNESEQPRDANTINDNDLKDQPKKKQKLGDYKVPSIADDEKNALPISKDGYIRVPKERVNVNLTSIKKLREKVDDSIHRELTDIFANLNYVGVVDEERRLAAIQHDLKLFLIDYGSVCYELFYQIGLTDFANFGKINLQSTNVSDDIVLYNLLSEFDELNDDASKEKIISKIWDMSSMLNEYYSIELVNDGLDNDLKSVKLKSLPLLLKGYIPSLVKLPFFIYRLGKEVDWEDEQECLDGILREIALLYIPDMVPKVDTLDASLSEDEKAQFINRKEHISSLLEHVLFPCIKRRFLAPRHILKDVVEIANLPDLYKVFERC

SEQ ID NO: 437 - protein, 769 aa, Artificial sequence
  hybrid human-yeast MLH1 protein with single amino acid variation
MSLRIKALDASVVNKIAAGEIIISPVNALKEMMENSIDAKSTSIQVIVKEGGLELIQIQDNGTGIRKEDLDIVCERFTTSKLQKFEDLSQIQTYGFRGEALASISHVARVTVTTKVKEDRCAWRVSYAEGKMLESPKPVAGKDGTTILVEDLFFNIPSRLRALRSHNDEYSKILDVVGRYAIHSKDIGFSCKKFGDSNYSLSVKPSYTVQDRIRTVFNKSVASNLITFHISKVEDLNLESVDGKVCNLNFISKKSISLIFFINNRLVTCDLLRRALNSVYSNYLPKGFRPFIYLGIVIDPAAVDVNVHPTKREVRFLSQDEIIEKIANQLHAELSAIDTSRTFKASSISTNKPESLIPFNDTIESDRNRKSLRQAQVVENSYTTANSQLRKAKRQENKLVRIDASQAKITSFLSSSQQFNFEGSSTKRQLSEPKVTNVSHSQEAEKLTLNESEQPRDANTINDNDLKDQPKKKQKLGDYKVPSIADDEKNALPISKDGYIRVPKERVNVNLTSIKKLREKVDDSIHRELTDIFANLNYVGVVDEERRLAAIQHDLKLFLIDYGSVCYELFYQIGLTDFANFGKINLQSTNVSDDIVLYNLLSEFDELNDDASKEKIISKIWDMSSMLNEYYSIELVNDGLDNDLKSVKLKSLPLLLKGYIPSLVKLPFFIYRLGKEVDWEDEQECLDGILREIALLYIPDMVPKVDTLDASLSEDEKAQFINRKEHISSLLEHVLFPCIKRRFLAPRHILKDVVEIANLPDLYKVFERC

SEQ ID NO: 438 - protein, 769 aa, Artificial sequence
  hybrid human-yeast MLH1 protein with single amino acid variation
MSLRIKALDASVVNKIAAGEIIISPVNALKEMMENSIDAKSTSIQVIVKEGGLNLIQIQDNGTGIRKEDLDIVCERFTTSKLQKFEDLSQIQTYGFRGEALASISHVARVTVTTKVKEDRCAWRVSYAEGKMLESPKPVAGKDGTTILVEDLFFNIPSRLRALRSHNDEYSKILDVVGRYAIHSKDIGFSCKKFGDSNYSLSVKPSYTVQDRIRTVFNKSVASNLITFHISKVEDLNLESVDGKVCNLNFISKKSISLIFFINNRLVTCDLLRRALNSVYSNYLPKGFRPFIYLGIVIDPAAVDVNVHPTKREVRFLSQDEIIEKIANQLHAELSAIDTSRTFKASSISTNKPESLIPFNDTIESDRNRKSLRQAQVVENSYTTANSQLRKAKRQENKLVRIDASQAKITSFLSSSQQFNFEGSSTKRQLSEPKVTNVSHSQEAEKLTLNESEQPRDANTINDNDLKDQPKKKQKLGDYKVPSIADDEKNALPISKDGYIRVPKERVNVNLTSIKKLREKVDDSIHRELTDIFANLNYVGVVDEERRLAAIQHDLKLFLIDYGSVCYELFYQIGLTDFANFGKINLQSTNVSDDIVLYNLLSEFDELNDDASKEKIISKIWDMSSMLNEYYSIELVNDGLDNDLKSVKLKSLPLLLKGYIPSLVKLPFFIYRLGKEVDWEDEQECLDGILREIALLYIPDMVPKVDTLDASLSEDEKAQFINRKEHISSLLEHVLFPCIKRRFLAPRHILKDVVEIANLPDLYKVFERC

SEQ ID NO: 439 - protein, 769 aa, Artificial sequence
  hybrid human-yeast MLH1 protein with single amino acid variation
MSLRIKALDASVVNKIAAGEIIISPVNALKEMMENSIDAKSTSIQVIVKEGGLKLNQIQDNGTGIRKEDLDIVCERFTTSKLQKFEDLSQIQTYGFRGEALASISHVARVTVTTKVKEDRCAWRVSYAEGKMLESPKPVAGKDGTTILVEDLFFNIPSRLRALRSHNDEYSKILDVVGRYAIHSKDIGFSCKKFGDSNYSLSVKPSYTVQDRIRTVFNKSVASNLITFHISKVEDLNLESVDGKVCNLNFISKKSISLIFFINNRLVTCDLLRRALNSVYSNYLPKGFRPFIYLGIVIDPAAVDVNVHPTKREVRFLSQDEIIEKIANQLHAELSAIDTSRTFKASSISTNKPESLIPFNDTIESDRNRKSLRQAQVVENSYTTANSQLRKAKRQENKLVRIDASQAKITSFLSSSQQFNFEGSSTKRQLSEPKVTNVSHSQEAEKLTLNESEQPRDANTINDNDLKDQPKKKQKLGDYKVPSIADDEKNALPISKDGYIRVPKERVNVNLTSIKKLREKVDDSIHRELTDIFANLNYVGVVDEERRLAAIQHDLKLFLIDYGSVCYELFYQIGLTDFANFGKINLQSTNVSDDIVLYNLLSEFDELNDDASKEKIISKIWDMSSMLNEYYSIELVNDGLDNDLKSVKLKSLPLLLKGYIPSLVKLPFFIYRLGKEVDWEDEQECLDGILREIALLYIPDMVPKVDTLDASLSEDEKAQFINRKEHISSLLEHVLFPCIKRRFLAPRHILKDVVEIANLPDLYKVFERC

SEQ ID NO: 440 - protein, 769 aa, Artificial sequence
  hybrid human-yeast MLH1 protein with single amino acid variation
MSLRIKALDASVVNKIAAGEIIISPVNALKEMMENSIDAKSTSIQVIVKEGGLKLFQIQDNGTGIRKEDLDIVCERFTTSKLQKFEDLSQIQTYGFRGEALASISHVARVTVTTKVKEDRCAWRVSYAEGKMLESPKPVAGKDGTTILVEDLFFNIPSRLRALRSHNDEYSKILDVVGRYAIHSKDIGFSCKKFGDSNYSLSVKPSYTVQDRIRTVFNKSVASNLITFHISKVEDLNLESVDGKVCNLNFISKKSISLIFFINNRLVTCDLLRRALNSVYSNYLPKGFRPFIYLGIVIDPAAVDVNVHPTKREVRFLSQDEIIEKIANQLHAELSAIDTSRTFKASSISTNKPESLIPFNDTIESDRNRKSLRQAQVVENSYTTANSQLRKAKRQENKLVRIDASQAKITSFLSSSQQFNFEGSSTKRQLSEPKVTNVSHSQEAEKLTLNESEQPRDANTINDNDLKDQPKKKQKLGDYKVPSIADDEKNALPISKDGYIRVPKERVNVNLTSIKKLREKVDDSIHRELTDIFANLNYVGVVDEERRLAAIQHDLKLFLIDYGSVCYELFYQIGLTDFANFGKINLQSTNVSDDIVLYNLLSEFDELNDDASKEKIISKIWDMSSMLNEYYSIELVNDGLDNDLKSVKLKSLPLLLKGYIPSLVKLPFFIYRLGKEVDWEDEQECLDGILREIALLYIPDMVPKVDTLDASLSEDEKAQFINRKEHISSLLEHVLFPCIKRRFLAPRHILKDVVEIANLPDLYKVFERC

SEQ ID NO: 441 - protein, 769 aa, Artificial sequence
  hybrid human-yeast MLH1 protein with single amino acid variation
MSLRIKALDASVVNKIAAGEIIISPVNALKEMMENSIDAKSTSIQVIVKEGGLKLTQIQDNGTGIRKEDLDIVCERFTTSKLQKFEDLSQIQTYGFRGEALASISHVARVTVTTKVKEDRCAWRVSYAEGKMLESPKPVAGKDGTTILVEDLFFNIPSRLRALRSHNDEYSKILDVVGRYAIHSKDIGFSCKKFGDSNYSLSVKPSYTVQDRIRTVFNKSVASNLITFHISKVEDLNLESVDGKVCNLNFISKKSISLIFFINNRLVTCDLLRRALNSVYSNYLPKGFRPFIYLGIVIDPAAVDVNVHPTKREVRFLSQDEIIEKIANQLHAELSAIDTSRTFKASSISTNKPESLIPFNDTIESDRNRKSLRQAQVVENSYTTANSQLRKAKRQENKLVRIDASQAKITSFLSSSQQFNFEGSSTKRQLSEPKVTNVSHSQEAEKLTLNESEQPRDANTINDNDLKDQPKKKQKLGDYKVPSIADDEKNALPISKDGYIRVPKERVNVNLTSIKKLREKVDDSIHRELTDIFANLNYVGVVDEERRLAAIQHDLKLFLIDYGSVCYELFYQIGLTDFANFGKINLQSTNVSDDIVLYNLLSEFDELNDDASKEKIISKIWDMSSMLNEYYSIELVNDGLDNDLKSVKLKSLPLLLKGYIPSLVKLPFFIYRLGKEVDWEDEQECLDGILREIALLYIPDMVPKVDTLDASLSEDEKAQFINRKEHISSLLEHVLFPCIKRRFLAPRHILKDVVEIANLPDLYKVFERC

SEQ ID NO: 442 - protein, 769 aa, Artificial sequence
  hybrid human-yeast MLH1 protein with single amino acid variation
MSLRIKALDASVVNKIAAGEIIISPVNALKEMMENSIDAKSTSIQVIVKEGGLKLIPIQDNGTGIRKEDLDIVCERFTTSKLQKFEDLSQIQTYGFRGEALASISHVARVTVTTKVKEDRCAWRVSYAEGKMLESPKPVAGKDGTTILVEDLFFNIPSRLRALRSHNDEYSKILDVVGRYAIHSKDIGFSCKKFGDSNYSLSVKPSYTVQDRIRTVFNKSVASNLITFHISKVEDLNLESVDGKVCNLNFISKKSISLIFFINNRLVTCDLLRRALNSVYSNYLPKGFRPFIYLGIVIDPAAVDVNVHPTKREVRFLSQDEIIEKIANQLHAELSAIDTSRTFKASSISTNKPESLIPFNDTIESDRNRKSLRQAQVVENSYTTANSQLRKAKRQENKLVRIDASQAKITSFLSSSQQFNFEGSSTKRQLSEPKVTNVSHSQEAEKLTLNESEQPRDANTINDNDLKDQPKKKQKLGDYKVPSIADDEKNALPISKDGYIRVPKERVNVNLTSIKKLREKVDDSIHRELTDIFANLNYVGVVDEERRLAAIQHDLKLFLIDYGSVCYELFYQIGLTDFANFGKINLQSTNVSDDIVLYNLLSEFDELNDDASKEKIISKIWDMSSMLNEYYSIELVNDGLDNDLKSVKLKSLPLLLKGYIPSLVKLPFFIYRLGKEVDWEDEQECLDGILREIALLYIPDMVPKVDTLDASLSEDEKAQFINRKEHISSLLEHVLFPCIKRRFLAPRHILKDVVEIANLPDLYKVFERC

SEQ ID NO: 443 - protein, 769 aa, Artificial sequence
  hybrid human-yeast MLH1 protein with single amino acid variation
MSLRIKALDASVVNKIAAGEIIISPVNALKEMMENSIDAKSTSIQVIVKEGGLKLIQNQDNGTGIRKEDLDIVCERFTTSKLQKFEDLSQIQTYGFRGEALASISHVARVTVTTKVKEDRCAWRVSYAEGKMLESPKPVAGKDGTTILVEDLFFNIPSRLRALRSHNDEYSKILDVVGRYAIHSKDIGFSCKKFGDSNYSLSVKPSYTVQDRIRTVFNKSVASNLITFHISKVEDLNLESVDGKVCNLNFISKKSISLIFFINNRLVTCDLLRRALNSVYSNYLPKGFRPFIYLGIVIDPAAVDVNVHPTKREVRFLSQDEIIEKIANQLHAELSAIDTSRTFKASSISTNKPESLIPFNDTIESDRNRKSLRQAQVVENSYTTANSQLRKAKRQENKLVRIDASQAKITSFLSSSQQFNFEGSSTKRQLSEPKVTNVSHSQEAEKLTLNESEQPRDANTINDNDLKDQPKKKQKLGDYKVPSIADDEKNALPISKDGYIRVPKERVNVNLTSIKKLREKVDDSIHRELTDIFANLNYVGVVDEERRLAAIQHDLKLFLIDYGSVCYELFYQIGLTDFANFGKINLQSTNVSDDIVLYNLLSEFDELNDDASKEKIISKIWDMSSMLNEYYSIELVNDGLDNDLKSVKLKSLPLLLKGYIPSLVKLPFFIYRLGKEVDWEDEQECLDGILREIALLYIPDMVPKVDTLDASLSEDEKAQFINRKEHISSLLEHVLFPCIKRRFLAPRHILKDVVEIANLPDLYKVFERC

SEQ ID NO: 444 - protein, 769 aa, Artificial sequence
  hybrid human-yeast MLH1 protein with single amino acid variation
MSLRIKALDASVVNKIAAGEIIISPVNALKEMMENSIDAKSTSIQVIVKEGGLKLIQIQYNGTGIRKEDLDIVCERFTTSKLQKFEDLSQIQTYGFRGEALASISHVARVTVTTKVKEDRCAWRVSYAEGKMLESPKPVAGKDGTTILVEDLFFNIPSRLRALRSHNDEYSKILDVVGRYAIHSKDIGFSCKKFGDSNYSLSVKPSYTVQDRIRTVFNKSVASNLITFHISKVEDLNLESVDGKVCNLNFISKKSISLIFFINNRLVTCDLLRRALNSVYSNYLPKGFRPFIYLGIVIDPAAVDVNVHPTKREVRFLSQDEIIEKIANQLHAELSAIDTSRTFKASSISTNKPESLIPFNDTIESDRNRKSLRQAQVVENSYTTANSQLRKAKRQENKLVRIDASQAKITSFLSSSQQFNFEGSSTKRQLSEPKVTNVSHSQEAEKLTLNESEQPRDANTINDNDLKDQPKKKQKLGDYKVPSIADDEKNALPISKDGYIRVPKERVNVNLTSIKKLREKVDDSIHRELTDIFANLNYVGVVDEERRLAAIQHDLKLFLIDYGSVCYELFYQIGLTDFANFGKINLQSTNVSDDIVLYNLLSEFDELNDDASKEKIISKIWDMSSMLNEYYSIELVNDGLDNDLKSVKLKSLPLLLKGYIPSLVKLPFFIYRLGKEVDWEDEQECLDGILREIALLYIPDMVPKVDTLDASLSEDEKAQFINRKEHISSLLEHVLFPCIKRRFLAPRHILKDVVEIANLPDLYKVFERC

SEQ ID NO: 445 - protein, 769 aa, Artificial sequence
  hybrid human-yeast MLH1 protein with single amino acid variation
MSLRIKALDASVVNKIAAGEIIISPVNALKEMMENSIDAKSTSIQVIVKEGGLKLIQIQDIGTGIRKEDLDIVCERFTTSKLQKFEDLSQIQTYGFRGEALASISHVARVTVTTKVKEDRCAWRVSYAEGKMLESPKPVAGKDGTTILVEDLFFNIPSRLRALRSHNDEYSKILDVVGRYAIHSKDIGFSCKKFGDSNYSLSVKPSYTVQDRIRTVFNKSVASNLITFHISKVEDLNLESVDGKVCNLNFISKKSISLIFFINNRLVTCDLLRRALNSVYSNYLPKGFRPFIYLGIVIDPAAVDVNVHPTKREVRFLSQDEIIEKIANQLHAELSAIDTSRTFKASSISTNKPESLIPFNDTIESDRNRKSLRQAQVVENSYTTANSQLRKAKRQENKLVRIDASQAKITSFLSSSQQFNFEGSSTKRQLSEPKVTNVSHSQEAEKLTLNESEQPRDANTINDNDLKDQPKKKQKLGDYKVPSIADDEKNALPISKDGYIRVPKERVNVNLTSIKKLREKVDDSIHRELTDIFANLNYVGVVDEERRLAAIQHDLKLFLIDYGSVCYELFYQIGLTDFANFGKINLQSTNVSDDIVLYNLLSEFDELNDDASKEKIISKIWDMSSMLNEYYSIELVNDGLDNDLKSVKLKSLPLLLKGYIPSLVKLPFFIYRLGKEVDWEDEQECLDGILREIALLYIPDMVPKVDTLDASLSEDEKAQFINRKEHISSLLEHVLFPCIKRRFLAPRHILKDVVEIANLPDLYKVFERC

SEQ ID NO: 446 - protein, 769 aa, Artificial sequence
  hybrid human-yeast MLH1 protein with single amino acid variation
MSLRIKALDASVVNKIAAGEIIISPVNALKEMMENSIDAKSTSIQVIVKEGGLKLIQIQDNVTGIRKEDLDIVCERFTTSKLQKFEDLSQIQTYGFRGEALASISHVARVTVTTKVKEDRCAWRVSYAEGKMLESPKPVAGKDGTTILVEDLFFNIPSRLRALRSHNDEYSKILDVVGRYAIHSKDIGFSCKKFGDSNYSLSVKPSYTVQDRIRTVFNKSVASNLITFHISKVEDLNLESVDGKVCNLNFISKKSISLIFFINNRLVTCDLLRRALNSVYSNYLPKGFRPFIYLGIVIDPAAVDVNVHPTKREVRFLSQDEIIEKIANQLHAELSAIDTSRTFKASSISTNKPESLIPFNDTIESDRNRKSLRQAQVVENSYTTANSQLRKAKRQENKLVRIDASQAKITSFLSSSQQFNFEGSSTKRQLSEPKVTNVSHSQEAEKLTLNESEQPRDANTINDNDLKDQPKKKQKLGDYKVPSIADDEKNALPISKDGYIRVPKERVNVNLTSIKKLREKVDDSIHRELTDIFANLNYVGVVDEERRLAAIQHDLKLFLIDYGSVCYELFYQIGLTDFANFGKINLQSTNVSDDIVLYNLLSEFDELNDDASKEKIISKIWDMSSMLNEYYSIELVNDGLDNDLKSVKLKSLPLLLKGYIPSLVKLPFFIYRLGKEVDWEDEQECLDGILREIALLYIPDMVPKVDTLDASLSEDEKAQFINRKEHISSLLEHVLFPCIKRRFLAPRHILKDVVEIANLPDLYKVFERC

SEQ ID NO: 447 - protein, 769 aa, Artificial sequence
  hybrid human-yeast MLH1 protein with single amino acid variation
MSLRIKALDASVVNKIAAGEIIISPVNALKEMMENSIDAKSTSIQVIVKEGGLKLIQIQDNATGIRKEDLDIVCERFTTSKLQKFEDLSQIQTYGFRGEALASISHVARVTVTTKVKEDRCAWRVSYAEGKMLESPKPVAGKDGTTILVEDLFFNIPSRLRALRSHNDEYSKILDVVGRYAIHSKDIGFSCKKFGDSNYSLSVKPSYTVQDRIRTVFNKSVASNLITFHISKVEDLNLESVDGKVCNLNFISKKSISLIFFINNRLVTCDLLRRALNSVYSNYLPKGFRPFIYLGIVIDPAAVDVNVHPTKREVRFLSQDEIIEKIANQLHAELSAIDTSRTFKASSISTNKPESLIPFNDTIESDRNRKSLRQAQVVENSYTTANSQLRKAKRQENKLVRIDASQAKITSFLSSSQQFNFEGSSTKRQLSEPKVTNVSHSQEAEKLTLNESEQPRDANTINDNDLKDQPKKKQKLGDYKVPSIADDEKNALPISKDGYIRVPKERVNVNLTSIKKLREKVDDSIHRELTDIFANLNYVGVVDEERRLAAIQHDLKLFLIDYGSVCYELFYQIGLTDFANFGKINLQSTNVSDDIVLYNLLSEFDELNDDASKEKIISKIWDMSSMLNEYYSIELVNDGLDNDLKSVKLKSLPLLLKGYIPSLVKLPFFIYRLGKEVDWEDEQECLDGILREIALLYIPDMVPKVDTLDASLSEDEKAQFINRKEHISSLLEHVLFPCIKRRFLAPRHILKDVVEIANLPDLYKVFERC

SEQ ID NO: 448 - protein, 769 aa, Artificial sequence
  hybrid human-yeast MLH1 protein with single amino acid variation
MSLRIKALDASVVNKIAAGEIIISPVNALKEMMENSIDAKSTSIQVIVKEGGLKLIQIQDNDTGIRKEDLDIVCERFTTSKLQKFEDLSQIQTYGFRGEALASISHVARVTVTTKVKEDRCAWRVSYAEGKMLESPKPVAGKDGTTILVEDLFFNIPSRLRALRSHNDEYSKILDVVGRYAIHSKDIGFSCKKFGDSNYSLSVKPSYTVQDRIRTVFNKSVASNLITFHISKVEDLNLESVDGKVCNLNFISKKSISLIFFINNRLVTCDLLRRALNSVYSNYLPKGFRPFIYLGIVIDPAAVDVNVHPTKREVRFLSQDEIIEKIANQLHAELSAIDTSRTFKASSISTNKPESLIPFNDTIESDRNRKSLRQAQVVENSYTTANSQLRKAKRQENKLVRIDASQAKITSFLSSSQQFNFEGSSTKRQLSEPKVTNVSHSQEAEKLTLNESEQPRDANTINDNDLKDQPKKKQKLGDYKVPSIADDEKNALPISKDGYIRVPKERVNVNLTSIKKLREKVDDSIHRELTDIFANLNYVGVVDEERRLAAIQHDLKLFLIDYGSVCYELFYQIGLTDFANFGKINLQSTNVSDDIVLYNLLSEFDELNDDASKEKIISKIWDMSSMLNEYYSIELVNDGLDNDLKSVKLKSLPLLLKGYIPSLVKLPFFIYRLGKEVDWEDEQECLDGILREIALLYIPDMVPKVDTLDASLSEDEKAQFINRKEHISSLLEHVLFPCIKRRFLAPRHILKDVVEIANLPDLYKVFERC

SEQ ID NO: 449 - protein, 769 aa, Artificial sequence
  hybrid human-yeast MLH1 protein with single amino acid variation
MSLRIKALDASVVNKIAAGEIIISPVNALKEMMENSIDAKSTSIQVIVKEGGLKLIQIQDNSTGIRKEDLDIVCERFTTSKLQKFEDLSQIQTYGFRGEALASISHVARVTVTTKVKEDRCAWRVSYAEGKMLESPKPVAGKDGTTILVEDLFFNIPSRLRALRSHNDEYSKILDVVGRYAIHSKDIGFSCKKFGDSNYSLSVKPSYTVQDRIRTVFNKSVASNLITFHISKVEDLNLESVDGKVCNLNFISKKSISLIFFINNRLVTCDLLRRALNSVYSNYLPKGFRPFIYLGIVIDPAAVDVNVHPTKREVRFLSQDEIIEKIANQLHAELSAIDTSRTFKASSISTNKPESLIPFNDTIESDRNRKSLRQAQVVENSYTTANSQLRKAKRQENKLVRIDASQAKITSFLSSSQQFNFEGSSTKRQLSEPKVTNVSHSQEAEKLTLNESEQPRDANTINDNDLKDQPKKKQKLGDYKVPSIADDEKNALPISKDGYIRVPKERVNVNLTSIKKLREKVDDSIHRELTDIFANLNYVGVVDEERRLAAIQHDLKLFLIDYGSVCYELFYQIGLTDFANFGKINLQSTNVSDDIVLYNLLSEFDELNDDASKEKIISKIWDMSSMLNEYYSIELVNDGLDNDLKSVKLKSLPLLLKGYIPSLVKLPFFIYRLGKEVDWEDEQECLDGILREIALLYIPDMVPKVDTLDASLSEDEKAQFINRKEHISSLLEHVLFPCIKRRFLAPRHILKDVVEIANLPDLYKVFERC

SEQ ID NO: 450 - protein, 769 aa, Artificial sequence
  hybrid human-yeast MLH1 protein with single amino acid variation
MSLRIKALDASVVNKIAAGEIIISPVNALKEMMENSIDAKSTSIQVIVKEGGLKLIQIQDNGTEIRKEDLDIVCERFTTSKLQKFEDLSQIQTYGFRGEALASISHVARVTVTTKVKEDRCAWRVSYAEGKMLESPKPVAGKDGTTILVEDLFFNIPSRLRALRSHNDEYSKILDVVGRYAIHSKDIGFSCKKFGDSNYSLSVKPSYTVQDRIRTVFNKSVASNLITFHISKVEDLNLESVDGKVCNLNFISKKSISLIFFINNRLVTCDLLRRALNSVYSNYLPKGFRPFIYLGIVIDPAAVDVNVHPTKREVRFLSQDEIIEKIANQLHAELSAIDTSRTFKASSISTNKPESLIPFNDTIESDRNRKSLRQAQVVENSYTTANSQLRKAKRQENKLVRIDASQAKITSFLSSSQQFNFEGSSTKRQLSEPKVTNVSHSQEAEKLTLNESEQPRDANTINDNDLKDQPKKKQKLGDYKVPSIADDEKNALPISKDGYIRVPKERVNVNLTSIKKLREKVDDSIHRELTDIFANLNYVGVVDEERRLAAIQHDLKLFLIDYGSVCYELFYQIGLTDFANFGKINLQSTNVSDDIVLYNLLSEFDELNDDASKEKIISKIWDMSSMLNEYYSIELVNDGLDNDLKSVKLKSLPLLLKGYIPSLVKLPFFIYRLGKEVDWEDEQECLDGILREIALLYIPDMVPKVDTLDASLSEDEKAQFINRKEHISSLLEHVLFPCIKRRFLAPRHILKDVVEIANLPDLYKVFERC

SEQ ID NO: 451 - protein, 769 aa, Artificial sequence
  hybrid human-yeast MLH1 protein with single amino acid variation
MSLRIKALDASVVNKIAAGEIIISPVNALKEMMENSIDAKSTSIQVIVKEGGLKLIQIQDNGTVIRKEDLDIVCERFTTSKLQKFEDLSQIQTYGFRGEALASISHVARVTVTTKVKEDRCAWRVSYAEGKMLESPKPVAGKDGTTILVEDLFFNIPSRLRALRSHNDEYSKILDVVGRYAIHSKDIGFSCKKFGDSNYSLSVKPSYTVQDRIRTVFNKSVASNLITFHISKVEDLNLESVDGKVCNLNFISKKSISLIFFINNRLVTCDLLRRALNSVYSNYLPKGFRPFIYLGIVIDPAAVDVNVHPTKREVRFLSQDEIIEKIANQLHAELSAIDTSRTFKASSISTNKPESLIPFNDTIESDRNRKSLRQAQVVENSYTTANSQLRKAKRQENKLVRIDASQAKITSFLSSSQQFNFEGSSTKRQLSEPKVTNVSHSQEAEKLTLNESEQPRDANTINDNDLKDQPKKKQKLGDYKVPSIADDEKNALPISKDGYIRVPKERVNVNLTSIKKLREKVDDSIHRELTDIFANLNYVGVVDEERRLAAIQHDLKLFLIDYGSVCYELFYQIGLTDFANFGKINLQSTNVSDDIVLYNLLSEFDELNDDASKEKIISKIWDMSSMLNEYYSIELVNDGLDNDLKSVKLKSLPLLLKGYIPSLVKLPFFIYRLGKEVDWEDEQECLDGILREIALLYIPDMVPKVDTLDASLSEDEKAQFINRKEHISSLLEHVLFPCIKRRFLAPRHILKDVVEIANLPDLYKVFERC

SEQ ID NO: 452 - protein, 769 aa, Artificial sequence
  hybrid human-yeast MLH1 protein with single amino acid variation
MSLRIKALDASVVNKIAAGEIIISPVNALKEMMENSIDAKSTSIQVIVKEGGLKLIQIQDNGTGNRKEDLDIVCERFTTSKLQKFEDLSQIQTYGFRGEALASISHVARVTVTTKVKEDRCAWRVSYAEGKMLESPKPVAGKDGTTILVEDLFFNIPSRLRALRSHNDEYSKILDVVGRYAIHSKDIGFSCKKFGDSNYSLSVKPSYTVQDRIRTVFNKSVASNLITFHISKVEDLNLESVDGKVCNLNFISKKSISLIFFINNRLVTCDLLRRALNSVYSNYLPKGFRPFIYLGIVIDPAAVDVNVHPTKREVRFLSQDEIIEKIANQLHAELSAIDTSRTFKASSISTNKPESLIPFNDTIESDRNRKSLRQAQVVENSYTTANSQLRKAKRQENKLVRIDASQAKITSFLSSSQQFNFEGSSTKRQLSEPKVTNVSHSQEAEKLTLNESEQPRDANTINDNDLKDQPKKKQKLGDYKVPSIADDEKNALPISKDGYIRVPKERVNVNLTSIKKLREKVDDSIHRELTDIFANLNYVGVVDEERRLAAIQHDLKLFLIDYGSVCYELFYQIGLTDFANFGKINLQSTNVSDDIVLYNLLSEFDELNDDASKEKIISKIWDMSSMLNEYYSIELVNDGLDNDLKSVKLKSLPLLLKGYIPSLVKLPFFIYRLGKEVDWEDEQECLDGILREIALLYIPDMVPKVDTLDASLSEDEKAQFINRKEHISSLLEHVLFPCIKRRFLAPRHILKDVVEIANLPDLYKVFERC

SEQ ID NO: 453 - protein, 769 aa, Artificial sequence
  hybrid human-yeast MLH1 protein with single amino acid variation
MSLRIKALDASVVNKIAAGEIIISPVNALKEMMENSIDAKSTSIQVIVKEGGLKLIQIQDNGTGFRKEDLDIVCERFTTSKLQKFEDLSQIQTYGFRGEALASISHVARVTVTTKVKEDRCAWRVSYAEGKMLESPKPVAGKDGTTILVEDLFFNIPSRLRALRSHNDEYSKILDVVGRYAIHSKDIGFSCKKFGDSNYSLSVKPSYTVQDRIRTVFNKSVASNLITFHISKVEDLNLESVDGKVCNLNFISKKSISLIFFINNRLVTCDLLRRALNSVYSNYLPKGFRPFIYLGIVIDPAAVDVNVHPTKREVRFLSQDEIIEKIANQLHAELSAIDTSRTFKASSISTNKPESLIPFNDTIESDRNRKSLRQAQVVENSYTTANSQLRKAKRQENKLVRIDASQAKITSFLSSSQQFNFEGSSTKRQLSEPKVTNVSHSQEAEKLTLNESEQPRDANTINDNDLKDQPKKKQKLGDYKVPSIADDEKNALPISKDGYIRVPKERVNVNLTSIKKLREKVDDSIHRELTDIFANLNYVGVVDEERRLAAIQHDLKLFLIDYGSVCYELFYQIGLTDFANFGKINLQSTNVSDDIVLYNLLSEFDELNDDASKEKIISKIWDMSSMLNEYYSIELVNDGLDNDLKSVKLKSLPLLLKGYIPSLVKLPFFIYRLGKEVDWEDEQECLDGILREIALLYIPDMVPKVDTLDASLSEDEKAQFINRKEHISSLLEHVLFPCIKRRFLAPRHILKDVVEIANLPDLYKVFERC

SEQ ID NO: 454 - protein, 769 aa, Artificial sequence
  hybrid human-yeast MLH1 protein with single amino acid variation
MSLRIKALDASVVNKIAAGEIIISPVNALKEMMENSIDAKSTSIQVIVKEGGLKLIQIQDNGTGSRKEDLDIVCERFTTSKLQKFEDLSQIQTYGFRGEALASISHVARVTVTTKVKEDRCAWRVSYAEGKMLESPKPVAGKDGTTILVEDLFFNIPSRLRALRSHNDEYSKILDVVGRYAIHSKDIGFSCKKFGDSNYSLSVKPSYTVQDRIRTVFNKSVASNLITFHISKVEDLNLESVDGKVCNLNFISKKSISLIFFINNRLVTCDLLRRALNSVYSNYLPKGFRPFIYLGIVIDPAAVDVNVHPTKREVRFLSQDEIIEKIANQLHAELSAIDTSRTFKASSISTNKPESLIPFNDTIESDRNRKSLRQAQVVENSYTTANSQLRKAKRQENKLVRIDASQAKITSFLSSSQQFNFEGSSTKRQLSEPKVTNVSHSQEAEKLTLNESEQPRDANTINDNDLKDQPKKKQKLGDYKVPSIADDEKNALPISKDGYIRVPKERVNVNLTSIKKLREKVDDSIHRELTDIFANLNYVGVVDEERRLAAIQHDLKLFLIDYGSVCYELFYQIGLTDFANFGKINLQSTNVSDDIVLYNLLSEFDELNDDASKEKIISKIWDMSSMLNEYYSIELVNDGLDNDLKSVKLKSLPLLLKGYIPSLVKLPFFIYRLGKEVDWEDEQECLDGILREIALLYIPDMVPKVDTLDASLSEDEKAQFINRKEHISSLLEHVLFPCIKRRFLAPRHILKDVVEIANLPDLYKVFERC

SEQ ID NO: 455 - protein, 769 aa, Artificial sequence
  hybrid human-yeast MLH1 protein with single amino acid variation
MSLRIKALDASVVNKIAAGEIIISPVNALKEMMENSIDAKSTSIQVIVKEGGLKLIQIQDNGTGIRNEDLDIVCERFTTSKLQKFEDLSQIQTYGFRGEALASISHVARVTVTTKVKEDRCAWRVSYAEGKMLESPKPVAGKDGTTILVEDLFFNIPSRLRALRSHNDEYSKILDVVGRYAIHSKDIGFSCKKFGDSNYSLSVKPSYTVQDRIRTVFNKSVASNLITFHISKVEDLNLESVDGKVCNLNFISKKSISLIFFINNRLVTCDLLRRALNSVYSNYLPKGFRPFIYLGIVIDPAAVDVNVHPTKREVRFLSQDEIIEKIANQLHAELSAIDTSRTFKASSISTNKPESLIPFNDTIESDRNRKSLRQAQVVENSYTTANSQLRKAKRQENKLVRIDASQAKITSFLSSSQQFNFEGSSTKRQLSEPKVTNVSHSQEAEKLTLNESEQPRDANTINDNDLKDQPKKKQKLGDYKVPSIADDEKNALPISKDGYIRVPKERVNVNLTSIKKLREKVDDSIHRELTDIFANLNYVGVVDEERRLAAIQHDLKLFLIDYGSVCYELFYQIGLTDFANFGKINLQSTNVSDDIVLYNLLSEFDELNDDASKEKIISKIWDMSSMLNEYYSIELVNDGLDNDLKSVKLKSLPLLLKGYIPSLVKLPFFIYRLGKEVDWEDEQECLDGILREIALLYIPDMVPKVDTLDASLSEDEKAQFINRKEHISSLLEHVLFPCIKRRFLAPRHILKDVVEIANLPDLYKVFERC

SEQ ID NO: 456 - protein, 769 aa, Artificial sequence
  hybrid human-yeast MLH1 protein with single amino acid variation
MSLRIKALDASVVNKIAAGEIIISPVNALKEMMENSIDAKSTSIQVIVKEGGLKLIQIQDNGTGIRIEDLDIVCERFTTSKLQKFEDLSQIQTYGFRGEALASISHVARVTVTTKVKEDRCAWRVSYAEGKMLESPKPVAGKDGTTILVEDLFFNIPSRLRALRSHNDEYSKILDVVGRYAIHSKDIGFSCKKFGDSNYSLSVKPSYTVQDRIRTVFNKSVASNLITFHISKVEDLNLESVDGKVCNLNFISKKSISLIFFINNRLVTCDLLRRALNSVYSNYLPKGFRPFIYLGIVIDPAAVDVNVHPTKREVRFLSQDEIIEKIANQLHAELSAIDTSRTFKASSISTNKPESLIPFNDTIESDRNRKSLRQAQVVENSYTTANSQLRKAKRQENKLVRIDASQAKITSFLSSSQQFNFEGSSTKRQLSEPKVTNVSHSQEAEKLTLNESEQPRDANTINDNDLKDQPKKKQKLGDYKVPSIADDEKNALPISKDGYIRVPKERVNVNLTSIKKLREKVDDSIHRELTDIFANLNYVGVVDEERRLAAIQHDLKLFLIDYGSVCYELFYQIGLTDFANFGKINLQSTNVSDDIVLYNLLSEFDELNDDASKEKIISKIWDMSSMLNEYYSIELVNDGLDNDLKSVKLKSLPLLLKGYIPSLVKLPFFIYRLGKEVDWEDEQECLDGILREIALLYIPDMVPKVDTLDASLSEDEKAQFINRKEHISSLLEHVLFPCIKRRFLAPRHILKDVVEIANLPDLYKVFERC

SEQ ID NO: 457 - protein, 769 aa, Artificial sequence
  hybrid human-yeast MLH1 protein with single amino acid variation
MSLRIKALDASVVNKIAAGEIIISPVNALKEMMENSIDAKSTSIQVIVKEGGLKLIQIQDNGTGIRKEGLDIVCERFTTSKLQKFEDLSQIQTYGFRGEALASISHVARVTVTTKVKEDRCAWRVSYAEGKMLESPKPVAGKDGTTILVEDLFFNIPSRLRALRSHNDEYSKILDVVGRYAIHSKDIGFSCKKFGDSNYSLSVKPSYTVQDRIRTVFNKSVASNLITFHISKVEDLNLESVDGKVCNLNFISKKSISLIFFINNRLVTCDLLRRALNSVYSNYLPKGFRPFIYLGIVIDPAAVDVNVHPTKREVRFLSQDEIIEKIANQLHAELSAIDTSRTFKASSISTNKPESLIPFNDTIESDRNRKSLRQAQVVENSYTTANSQLRKAKRQENKLVRIDASQAKITSFLSSSQQFNFEGSSTKRQLSEPKVTNVSHSQEAEKLTLNESEQPRDANTINDNDLKDQPKKKQKLGDYKVPSIADDEKNALPISKDGYIRVPKERVNVNLTSIKKLREKVDDSIHRELTDIFANLNYVGVVDEERRLAAIQHDLKLFLIDYGSVCYELFYQIGLTDFANFGKINLQSTNVSDDIVLYNLLSEFDELNDDASKEKIISKIWDMSSMLNEYYSIELVNDGLDNDLKSVKLKSLPLLLKGYIPSLVKLPFFIYRLGKEVDWEDEQECLDGILREIALLYIPDMVPKVDTLDASLSEDEKAQFINRKEHISSLLEHVLFPCIKRRFLAPRHILKDVVEIANLPDLYKVFERC

SEQ ID NO: 458 - protein, 769 aa, Artificial sequence
  hybrid human-yeast MLH1 protein with single amino acid variation
MSLRIKALDASVVNKIAAGEIIISPVNALKEMMENSIDAKSTSIQVIVKEGGLKLIQIQDNGTGIRKEVLDIVCERFTTSKLQKFEDLSQIQTYGFRGEALASISHVARVTVTTKVKEDRCAWRVSYAEGKMLESPKPVAGKDGTTILVEDLFFNIPSRLRALRSHNDEYSKILDVVGRYAIHSKDIGFSCKKFGDSNYSLSVKPSYTVQDRIRTVFNKSVASNLITFHISKVEDLNLESVDGKVCNLNFISKKSISLIFFINNRLVTCDLLRRALNSVYSNYLPKGFRPFIYLGIVIDPAAVDVNVHPTKREVRFLSQDEIIEKIANQLHAELSAIDTSRTFKASSISTNKPESLIPFNDTIESDRNRKSLRQAQVVENSYTTANSQLRKAKRQENKLVRIDASQAKITSFLSSSQQFNFEGSSTKRQLSEPKVTNVSHSQEAEKLTLNESEQPRDANTINDNDLKDQPKKKQKLGDYKVPSIADDEKNALPISKDGYIRVPKERVNVNLTSIKKLREKVDDSIHRELTDIFANLNYVGVVDEERRLAAIQHDLKLFLIDYGSVCYELFYQIGLTDFANFGKINLQSTNVSDDIVLYNLLSEFDELNDDASKEKIISKIWDMSSMLNEYYSIELVNDGLDNDLKSVKLKSLPLLLKGYIPSLVKLPFFIYRLGKEVDWEDEQECLDGILREIALLYIPDMVPKVDTLDASLSEDEKAQFINRKEHISSLLEHVLFPCIKRRFLAPRHILKDVVEIANLPDLYKVFERC

SEQ ID NO: 459 - protein, 769 aa, Artificial sequence
  hybrid human-yeast MLH1 protein with single amino acid variation
MSLRIKALDASVVNKIAAGEIIISPVNALKEMMENSIDAKSTSIQVIVKEGGLKLIQIQDNGTGIRKEDMDIVCERFTTSKLQKFEDLSQIQTYGFRGEALASISHVARVTVTTKVKEDRCAWRVSYAEGKMLESPKPVAGKDGTTILVEDLFFNIPSRLRALRSHNDEYSKILDVVGRYAIHSKDIGFSCKKFGDSNYSLSVKPSYTVQDRIRTVFNKSVASNLITFHISKVEDLNLESVDGKVCNLNFISKKSISLIFFINNRLVTCDLLRRALNSVYSNYLPKGFRPFIYLGIVIDPAAVDVNVHPTKREVRFLSQDEIIEKIANQLHAELSAIDTSRTFKASSISTNKPESLIPFNDTIESDRNRKSLRQAQVVENSYTTANSQLRKAKRQENKLVRIDASQAKITSFLSSSQQFNFEGSSTKRQLSEPKVTNVSHSQEAEKLTLNESEQPRDANTINDNDLKDQPKKKQKLGDYKVPSIADDEKNALPISKDGYIRVPKERVNVNLTSIKKLREKVDDSIHRELTDIFANLNYVGVVDEERRLAAIQHDLKLFLIDYGSVCYELFYQIGLTDFANFGKINLQSTNVSDDIVLYNLLSEFDELNDDASKEKIISKIWDMSSMLNEYYSIELVNDGLDNDLKSVKLKSLPLLLKGYIPSLVKLPFFIYRLGKEVDWEDEQECLDGILREIALLYIPDMVPKVDTLDASLSEDEKAQFINRKEHISSLLEHVLFPCIKRRFLAPRHILKDVVEIANLPDLYKVFERC

SEQ ID NO: 460 - protein, 769 aa, Artificial sequence
  hybrid human-yeast MLH1 protein with single amino acid variation
MSLRIKALDASVVNKIAAGEIIISPVNALKEMMENSIDAKSTSIQVIVKEGGLKLIQIQDNGTGIRKEDPDIVCERFTTSKLQKFEDLSQIQTYGFRGEALASISHVARVTVTTKVKEDRCAWRVSYAEGKMLESPKPVAGKDGTTILVEDLFFNIPSRLRALRSHNDEYSKILDVVGRYAIHSKDIGFSCKKFGDSNYSLSVKPSYTVQDRIRTVFNKSVASNLITFHISKVEDLNLESVDGKVCNLNFISKKSISLIFFINNRLVTCDLLRRALNSVYSNYLPKGFRPFIYLGIVIDPAAVDVNVHPTKREVRFLSQDEIIEKIANQLHAELSAIDTSRTFKASSISTNKPESLIPFNDTIESDRNRKSLRQAQVVENSYTTANSQLRKAKRQENKLVRIDASQAKITSFLSSSQQFNFEGSSTKRQLSEPKVTNVSHSQEAEKLTLNESEQPRDANTINDNDLKDQPKKKQKLGDYKVPSIADDEKNALPISKDGYIRVPKERVNVNLTSIKKLREKVDDSIHRELTDIFANLNYVGVVDEERRLAAIQHDLKLFLIDYGSVCYELFYQIGLTDFANFGKINLQSTNVSDDIVLYNLLSEFDELNDDASKEKIISKIWDMSSMLNEYYSIELVNDGLDNDLKSVKLKSLPLLLKGYIPSLVKLPFFIYRLGKEVDWEDEQECLDGILREIALLYIPDMVPKVDTLDASLSEDEKAQFINRKEHISSLLEHVLFPCIKRRFLAPRHILKDVVEIANLPDLYKVFERC

SEQ ID NO: 461 - protein, 769 aa, Artificial sequence
  hybrid human-yeast MLH1 protein with single amino acid variation
MSLRIKALDASVVNKIAAGEIIISPVNALKEMMENSIDAKSTSIQVIVKEGGLKLIQIQDNGTGIRKEDQDIVCERFTTSKLQKFEDLSQIQTYGFRGEALASISHVARVTVTTKVKEDRCAWRVSYAEGKMLESPKPVAGKDGTTILVEDLFFNIPSRLRALRSHNDEYSKILDVVGRYAIHSKDIGFSCKKFGDSNYSLSVKPSYTVQDRIRTVFNKSVASNLITFHISKVEDLNLESVDGKVCNLNFISKKSISLIFFINNRLVTCDLLRRALNSVYSNYLPKGFRPFIYLGIVIDPAAVDVNVHPTKREVRFLSQDEIIEKIANQLHAELSAIDTSRTFKASSISTNKPESLIPFNDTIESDRNRKSLRQAQVVENSYTTANSQLRKAKRQENKLVRIDASQAKITSFLSSSQQFNFEGSSTKRQLSEPKVTNVSHSQEAEKLTLNESEQPRDANTINDNDLKDQPKKKQKLGDYKVPSIADDEKNALPISKDGYIRVPKERVNVNLTSIKKLREKVDDSIHRELTDIFANLNYVGVVDEERRLAAIQHDLKLFLIDYGSVCYELFYQIGLTDFANFGKINLQSTNVSDDIVLYNLLSEFDELNDDASKEKIISKIWDMSSMLNEYYSIELVNDGLDNDLKSVKLKSLPLLLKGYIPSLVKLPFFIYRLGKEVDWEDEQECLDGILREIALLYIPDMVPKVDTLDASLSEDEKAQFINRKEHISSLLEHVLFPCIKRRFLAPRHILKDVVEIANLPDLYKVFERC

SEQ ID NO: 462 - protein, 769 aa, Artificial sequence
  hybrid human-yeast MLH1 protein with single amino acid variation
MSLRIKALDASVVNKIAAGEIIISPVNALKEMMENSIDAKSTSIQVIVKEGGLKLIQIQDNGTGIRKEDLDIECERFTTSKLQKFEDLSQIQTYGFRGEALASISHVARVTVTTKVKEDRCAWRVSYAEGKMLESPKPVAGKDGTTILVEDLFFNIPSRLRALRSHNDEYSKILDVVGRYAIHSKDIGFSCKKFGDSNYSLSVKPSYTVQDRIRTVFNKSVASNLITFHISKVEDLNLESVDGKVCNLNFISKKSISLIFFINNRLVTCDLLRRALNSVYSNYLPKGFRPFIYLGIVIDPAAVDVNVHPTKREVRFLSQDEIIEKIANQLHAELSAIDTSRTFKASSISTNKPESLIPFNDTIESDRNRKSLRQAQVVENSYTTANSQLRKAKRQENKLVRIDASQAKITSFLSSSQQFNFEGSSTKRQLSEPKVTNVSHSQEAEKLTLNESEQPRDANTINDNDLKDQPKKKQKLGDYKVPSIADDEKNALPISKDGYIRVPKERVNVNLTSIKKLREKVDDSIHRELTDIFANLNYVGVVDEERRLAAIQHDLKLFLIDYGSVCYELFYQIGLTDFANFGKINLQSTNVSDDIVLYNLLSEFDELNDDASKEKIISKIWDMSSMLNEYYSIELVNDGLDNDLKSVKLKSLPLLLKGYIPSLVKLPFFIYRLGKEVDWEDEQECLDGILREIALLYIPDMVPKVDTLDASLSEDEKAQFINRKEHISSLLEHVLFPCIKRRFLAPRHILKDVVEIANLPDLYKVFERC

SEQ ID NO: 463 - protein, 769 aa, Artificial sequence
  hybrid human-yeast MLH1 protein with single amino acid variation
MSLRIKALDASVVNKIAAGEIIISPVNALKEMMENSIDAKSTSIQVIVKEGGLKLIQIQDNGTGIRKEDLDIVGERFTTSKLQKFEDLSQIQTYGFRGEALASISHVARVTVTTKVKEDRCAWRVSYAEGKMLESPKPVAGKDGTTILVEDLFFNIPSRLRALRSHNDEYSKILDVVGRYAIHSKDIGFSCKKFGDSNYSLSVKPSYTVQDRIRTVFNKSVASNLITFHISKVEDLNLESVDGKVCNLNFISKKSISLIFFINNRLVTCDLLRRALNSVYSNYLPKGFRPFIYLGIVIDPAAVDVNVHPTKREVRFLSQDEIIEKIANQLHAELSAIDTSRTFKASSISTNKPESLIPFNDTIESDRNRKSLRQAQVVENSYTTANSQLRKAKRQENKLVRIDASQAKITSFLSSSQQFNFEGSSTKRQLSEPKVTNVSHSQEAEKLTLNESEQPRDANTINDNDLKDQPKKKQKLGDYKVPSIADDEKNALPISKDGYIRVPKERVNVNLTSIKKLREKVDDSIHRELTDIFANLNYVGVVDEERRLAAIQHDLKLFLIDYGSVCYELFYQIGLTDFANFGKINLQSTNVSDDIVLYNLLSEFDELNDDASKEKIISKIWDMSSMLNEYYSIELVNDGLDNDLKSVKLKSLPLLLKGYIPSLVKLPFFIYRLGKEVDWEDEQECLDGILREIALLYIPDMVPKVDTLDASLSEDEKAQFINRKEHISSLLEHVLFPCIKRRFLAPRHILKDVVEIANLPDLYKVFERC

SEQ ID NO: 464 - protein, 769 aa, Artificial sequence
  hybrid human-yeast MLH1 protein with single amino acid variation
MSLRIKALDASVVNKIAAGEIIISPVNALKEMMENSIDAKSTSIQVIVKEGGLKLIQIQDNGTGIRKEDLDIVSERFTTSKLQKFEDLSQIQTYGFRGEALASISHVARVTVTTKVKEDRCAWRVSYAEGKMLESPKPVAGKDGTTILVEDLFFNIPSRLRALRSHNDEYSKILDVVGRYAIHSKDIGFSCKKFGDSNYSLSVKPSYTVQDRIRTVFNKSVASNLITFHISKVEDLNLESVDGKVCNLNFISKKSISLIFFINNRLVTCDLLRRALNSVYSNYLPKGFRPFIYLGIVIDPAAVDVNVHPTKREVRFLSQDEIIEKIANQLHAELSAIDTSRTFKASSISTNKPESLIPFNDTIESDRNRKSLRQAQVVENSYTTANSQLRKAKRQENKLVRIDASQAKITSFLSSSQQFNFEGSSTKRQLSEPKVTNVSHSQEAEKLTLNESEQPRDANTINDNDLKDQPKKKQKLGDYKVPSIADDEKNALPISKDGYIRVPKERVNVNLTSIKKLREKVDDSIHRELTDIFANLNYVGVVDEERRLAAIQHDLKLFLIDYGSVCYELFYQIGLTDFANFGKINLQSTNVSDDIVLYNLLSEFDELNDDASKEKIISKIWDMSSMLNEYYSIELVNDGLDNDLKSVKLKSLPLLLKGYIPSLVKLPFFIYRLGKEVDWEDEQECLDGILREIALLYIPDMVPKVDTLDASLSEDEKAQFINRKEHISSLLEHVLFPCIKRRFLAPRHILKDVVEIANLPDLYKVFERC

SEQ ID NO: 465 - protein, 769 aa, Artificial sequence
  hybrid human-yeast MLH1 protein with single amino acid variation
MSLRIKALDASVVNKIAAGEIIISPVNALKEMMENSIDAKSTSIQVIVKEGGLKLIQIQDNGTGIRKEDLDIVCEWFTTSKLQKFEDLSQIQTYGFRGEALASISHVARVTVTTKVKEDRCAWRVSYAEGKMLESPKPVAGKDGTTILVEDLFFNIPSRLRALRSHNDEYSKILDVVGRYAIHSKDIGFSCKKFGDSNYSLSVKPSYTVQDRIRTVFNKSVASNLITFHISKVEDLNLESVDGKVCNLNFISKKSISLIFFINNRLVTCDLLRRALNSVYSNYLPKGFRPFIYLGIVIDPAAVDVNVHPTKREVRFLSQDEIIEKIANQLHAELSAIDTSRTFKASSISTNKPESLIPFNDTIESDRNRKSLRQAQVVENSYTTANSQLRKAKRQENKLVRIDASQAKITSFLSSSQQFNFEGSSTKRQLSEPKVTNVSHSQEAEKLTLNESEQPRDANTINDNDLKDQPKKKQKLGDYKVPSIADDEKNALPISKDGYIRVPKERVNVNLTSIKKLREKVDDSIHRELTDIFANLNYVGVVDEERRLAAIQHDLKLFLIDYGSVCYELFYQIGLTDFANFGKINLQSTNVSDDIVLYNLLSEFDELNDDASKEKIISKIWDMSSMLNEYYSIELVNDGLDNDLKSVKLKSLPLLLKGYIPSLVKLPFFIYRLGKEVDWEDEQECLDGILREIALLYIPDMVPKVDTLDASLSEDEKAQFINRKEHISSLLEHVLFPCIKRRFLAPRHILKDVVEIANLPDLYKVFERC

SEQ ID NO: 466 - protein, 769 aa, Artificial sequence
  hybrid human-yeast MLH1 protein with single amino acid variation
MSLRIKALDASVVNKIAAGEIIISPVNALKEMMENSIDAKSTSIQVIVKEGGLKLIQIQDNGTGIRKEDLDIVCERSTTSKLQKFEDLSQIQTYGFRGEALASISHVARVTVTTKVKEDRCAWRVSYAEGKMLESPKPVAGKDGTTILVEDLFFNIPSRLRALRSHNDEYSKILDVVGRYAIHSKDIGFSCKKFGDSNYSLSVKPSYTVQDRIRTVFNKSVASNLITFHISKVEDLNLESVDGKVCNLNFISKKSISLIFFINNRLVTCDLLRRALNSVYSNYLPKGFRPFIYLGIVIDPAAVDVNVHPTKREVRFLSQDEIIEKIANQLHAELSAIDTSRTFKASSISTNKPESLIPFNDTIESDRNRKSLRQAQVVENSYTTANSQLRKAKRQENKLVRIDASQAKITSFLSSSQQFNFEGSSTKRQLSEPKVTNVSHSQEAEKLTLNESEQPRDANTINDNDLKDQPKKKQKLGDYKVPSIADDEKNALPISKDGYIRVPKERVNVNLTSIKKLREKVDDSIHRELTDIFANLNYVGVVDEERRLAAIQHDLKLFLIDYGSVCYELFYQIGLTDFANFGKINLQSTNVSDDIVLYNLLSEFDELNDDASKEKIISKIWDMSSMLNEYYSIELVNDGLDNDLKSVKLKSLPLLLKGYIPSLVKLPFFIYRLGKEVDWEDEQECLDGILREIALLYIPDMVPKVDTLDASLSEDEKAQFINRKEHISSLLEHVLFPCIKRRFLAPRHILKDVVEIANLPDLYKVFERC

SEQ ID NO: 467 - protein, 769 aa, Artificial sequence
  hybrid human-yeast MLH1 protein with single amino acid variation
MSLRIKALDASVVNKIAAGEIIISPVNALKEMMENSIDAKSTSIQVIVKEGGLKLIQIQDNGTGIRKEDLDIVCERLTTSKLQKFEDLSQIQTYGFRGEALASISHVARVTVTTKVKEDRCAWRVSYAEGKMLESPKPVAGKDGTTILVEDLFFNIPSRLRALRSHNDEYSKILDVVGRYAIHSKDIGFSCKKFGDSNYSLSVKPSYTVQDRIRTVFNKSVASNLITFHISKVEDLNLESVDGKVCNLNFISKKSISLIFFINNRLVTCDLLRRALNSVYSNYLPKGFRPFIYLGIVIDPAAVDVNVHPTKREVRFLSQDEIIEKIANQLHAELSAIDTSRTFKASSISTNKPESLIPFNDTIESDRNRKSLRQAQVVENSYTTANSQLRKAKRQENKLVRIDASQAKITSFLSSSQQFNFEGSSTKRQLSEPKVTNVSHSQEAEKLTLNESEQPRDANTINDNDLKDQPKKKQKLGDYKVPSIADDEKNALPISKDGYIRVPKERVNVNLTSIKKLREKVDDSIHRELTDIFANLNYVGVVDEERRLAAIQHDLKLFLIDYGSVCYELFYQIGLTDFANFGKINLQSTNVSDDIVLYNLLSEFDELNDDASKEKIISKIWDMSSMLNEYYSIELVNDGLDNDLKSVKLKSLPLLLKGYIPSLVKLPFFIYRLGKEVDWEDEQECLDGILREIALLYIPDMVPKVDTLDASLSEDEKAQFINRKEHISSLLEHVLFPCIKRRFLAPRHILKDVVEIANLPDLYKVFERC

SEQ ID NO: 468 - protein, 769 aa, Artificial sequence
  hybrid human-yeast MLH1 protein with single amino acid variation
MSLRIKALDASVVNKIAAGEIIISPVNALKEMMENSIDAKSTSIQVIVKEGGLKLIQIQDNGTGIRKEDLDIVCERITTSKLQKFEDLSQIQTYGFRGEALASISHVARVTVTTKVKEDRCAWRVSYAEGKMLESPKPVAGKDGTTILVEDLFFNIPSRLRALRSHNDEYSKILDVVGRYAIHSKDIGFSCKKFGDSNYSLSVKPSYTVQDRIRTVFNKSVASNLITFHISKVEDLNLESVDGKVCNLNFISKKSISLIFFINNRLVTCDLLRRALNSVYSNYLPKGFRPFIYLGIVIDPAAVDVNVHPTKREVRFLSQDEIIEKIANQLHAELSAIDTSRTFKASSISTNKPESLIPFNDTIESDRNRKSLRQAQVVENSYTTANSQLRKAKRQENKLVRIDASQAKITSFLSSSQQFNFEGSSTKRQLSEPKVTNVSHSQEAEKLTLNESEQPRDANTINDNDLKDQPKKKQKLGDYKVPSIADDEKNALPISKDGYIRVPKERVNVNLTSIKKLREKVDDSIHRELTDIFANLNYVGVVDEERRLAAIQHDLKLFLIDYGSVCYELFYQIGLTDFANFGKINLQSTNVSDDIVLYNLLSEFDELNDDASKEKIISKIWDMSSMLNEYYSIELVNDGLDNDLKSVKLKSLPLLLKGYIPSLVKLPFFIYRLGKEVDWEDEQECLDGILREIALLYIPDMVPKVDTLDASLSEDEKAQFINRKEHISSLLEHVLFPCIKRRFLAPRHILKDVVEIANLPDLYKVFERC

SEQ ID NO: 469 - protein, 769 aa, Artificial sequence
  hybrid human-yeast MLH1 protein with single amino acid variation
MSLRIKALDASVVNKIAAGEIIISPVNALKEMMENSIDAKSTSIQVIVKEGGLKLIQIQDNGTGIRKEDLDIVCERFMTSKLQKFEDLSQIQTYGFRGEALASISHVARVTVTTKVKEDRCAWRVSYAEGKMLESPKPVAGKDGTTILVEDLFFNIPSRLRALRSHNDEYSKILDVVGRYAIHSKDIGFSCKKFGDSNYSLSVKPSYTVQDRIRTVFNKSVASNLITFHISKVEDLNLESVDGKVCNLNFISKKSISLIFFINNRLVTCDLLRRALNSVYSNYLPKGFRPFIYLGIVIDPAAVDVNVHPTKREVRFLSQDEIIEKIANQLHAELSAIDTSRTFKASSISTNKPESLIPFNDTIESDRNRKSLRQAQVVENSYTTANSQLRKAKRQENKLVRIDASQAKITSFLSSSQQFNFEGSSTKRQLSEPKVTNVSHSQEAEKLTLNESEQPRDANTINDNDLKDQPKKKQKLGDYKVPSIADDEKNALPISKDGYIRVPKERVNVNLTSIKKLREKVDDSIHRELTDIFANLNYVGVVDEERRLAAIQHDLKLFLIDYGSVCYELFYQIGLTDFANFGKINLQSTNVSDDIVLYNLLSEFDELNDDASKEKIISKIWDMSSMLNEYYSIELVNDGLDNDLKSVKLKSLPLLLKGYIPSLVKLPFFIYRLGKEVDWEDEQECLDGILREIALLYIPDMVPKVDTLDASLSEDEKAQFINRKEHISSLLEHVLFPCIKRRFLAPRHILKDVVEIANLPDLYKVFERC

SEQ ID NO: 470 - protein, 769 aa, Artificial sequence
  hybrid human-yeast MLH1 protein with single amino acid variation
MSLRIKALDASVVNKIAAGEIIISPVNALKEMMENSIDAKSTSIQVIVKEGGLKLIQIQDNGTGIRKEDLDIVCERFTSSKLQKFEDLSQIQTYGFRGEALASISHVARVTVTTKVKEDRCAWRVSYAEGKMLESPKPVAGKDGTTILVEDLFFNIPSRLRALRSHNDEYSKILDVVGRYAIHSKDIGFSCKKFGDSNYSLSVKPSYTVQDRIRTVFNKSVASNLITFHISKVEDLNLESVDGKVCNLNFISKKSISLIFFINNRLVTCDLLRRALNSVYSNYLPKGFRPFIYLGIVIDPAAVDVNVHPTKREVRFLSQDEIIEKIANQLHAELSAIDTSRTFKASSISTNKPESLIPFNDTIESDRNRKSLRQAQVVENSYTTANSQLRKAKRQENKLVRIDASQAKITSFLSSSQQFNFEGSSTKRQLSEPKVTNVSHSQEAEKLTLNESEQPRDANTINDNDLKDQPKKKQKLGDYKVPSIADDEKNALPISKDGYIRVPKERVNVNLTSIKKLREKVDDSIHRELTDIFANLNYVGVVDEERRLAAIQHDLKLFLIDYGSVCYELFYQIGLTDFANFGKINLQSTNVSDDIVLYNLLSEFDELNDDASKEKIISKIWDMSSMLNEYYSIELVNDGLDNDLKSVKLKSLPLLLKGYIPSLVKLPFFIYRLGKEVDWEDEQECLDGILREIALLYIPDMVPKVDTLDASLSEDEKAQFINRKEHISSLLEHVLFPCIKRRFLAPRHILKDVVEIANLPDLYKVFERC

SEQ ID NO: 471 - protein, 769 aa, Artificial sequence
  hybrid human-yeast MLH1 protein with single amino acid variation
MSLRIKALDASVVNKIAAGEIIISPVNALKEMMENSIDAKSTSIQVIVKEGGLKLIQIQDNGTGIRKEDLDIVCERFTKSKLQKFEDLSQIQTYGFRGEALASISHVARVTVTTKVKEDRCAWRVSYAEGKMLESPKPVAGKDGTTILVEDLFFNIPSRLRALRSHNDEYSKILDVVGRYAIHSKDIGFSCKKFGDSNYSLSVKPSYTVQDRIRTVFNKSVASNLITFHISKVEDLNLESVDGKVCNLNFISKKSISLIFFINNRLVTCDLLRRALNSVYSNYLPKGFRPFIYLGIVIDPAAVDVNVHPTKREVRFLSQDEIIEKIANQLHAELSAIDTSRTFKASSISTNKPESLIPFNDTIESDRNRKSLRQAQVVENSYTTANSQLRKAKRQENKLVRIDASQAKITSFLSSSQQFNFEGSSTKRQLSEPKVTNVSHSQEAEKLTLNESEQPRDANTINDNDLKDQPKKKQKLGDYKVPSIADDEKNALPISKDGYIRVPKERVNVNLTSIKKLREKVDDSIHRELTDIFANLNYVGVVDEERRLAAIQHDLKLFLIDYGSVCYELFYQIGLTDFANFGKINLQSTNVSDDIVLYNLLSEFDELNDDASKEKIISKIWDMSSMLNEYYSIELVNDGLDNDLKSVKLKSLPLLLKGYIPSLVKLPFFIYRLGKEVDWEDEQECLDGILREIALLYIPDMVPKVDTLDASLSEDEKAQFINRKEHISSLLEHVLFPCIKRRFLAPRHILKDVVEIANLPDLYKVFERC

SEQ ID NO: 472 - protein, 769 aa, Artificial sequence
  hybrid human-yeast MLH1 protein with single amino acid variation
MSLRIKALDASVVNKIAAGEIIISPVNALKEMMENSIDAKSTSIQVIVKEGGLKLIQIQDNGTGIRKEDLDIVCERFTMSKLQKFEDLSQIQTYGFRGEALASISHVARVTVTTKVKEDRCAWRVSYAEGKMLESPKPVAGKDGTTILVEDLFFNIPSRLRALRSHNDEYSKILDVVGRYAIHSKDIGFSCKKFGDSNYSLSVKPSYTVQDRIRTVFNKSVASNLITFHISKVEDLNLESVDGKVCNLNFISKKSISLIFFINNRLVTCDLLRRALNSVYSNYLPKGFRPFIYLGIVIDPAAVDVNVHPTKREVRFLSQDEIIEKIANQLHAELSAIDTSRTFKASSISTNKPESLIPFNDTIESDRNRKSLRQAQVVENSYTTANSQLRKAKRQENKLVRIDASQAKITSFLSSSQQFNFEGSSTKRQLSEPKVTNVSHSQEAEKLTLNESEQPRDANTINDNDLKDQPKKKQKLGDYKVPSIADDEKNALPISKDGYIRVPKERVNVNLTSIKKLREKVDDSIHRELTDIFANLNYVGVVDEERRLAAIQHDLKLFLIDYGSVCYELFYQIGLTDFANFGKINLQSTNVSDDIVLYNLLSEFDELNDDASKEKIISKIWDMSSMLNEYYSIELVNDGLDNDLKSVKLKSLPLLLKGYIPSLVKLPFFIYRLGKEVDWEDEQECLDGILREIALLYIPDMVPKVDTLDASLSEDEKAQFINRKEHISSLLEHVLFPCIKRRFLAPRHILKDVVEIANLPDLYKVFERC

SEQ ID NO: 473 - protein, 769 aa, Artificial sequence
  hybrid human-yeast MLH1 protein with single amino acid variation
MSLRIKALDASVVNKIAAGEIIISPVNALKEMMENSIDAKSTSIQVIVKEGGLKLIQIQDNGTGIRKEDLDIVCERFTTPKLQKFEDLSQIQTYGFRGEALASISHVARVTVTTKVKEDRCAWRVSYAEGKMLESPKPVAGKDGTTILVEDLFFNIPSRLRALRSHNDEYSKILDVVGRYAIHSKDIGFSCKKFGDSNYSLSVKPSYTVQDRIRTVFNKSVASNLITFHISKVEDLNLESVDGKVCNLNFISKKSISLIFFINNRLVTCDLLRRALNSVYSNYLPKGFRPFIYLGIVIDPAAVDVNVHPTKREVRFLSQDEIIEKIANQLHAELSAIDTSRTFKASSISTNKPESLIPFNDTIESDRNRKSLRQAQVVENSYTTANSQLRKAKRQENKLVRIDASQAKITSFLSSSQQFNFEGSSTKRQLSEPKVTNVSHSQEAEKLTLNESEQPRDANTINDNDLKDQPKKKQKLGDYKVPSIADDEKNALPISKDGYIRVPKERVNVNLTSIKKLREKVDDSIHRELTDIFANLNYVGVVDEERRLAAIQHDLKLFLIDYGSVCYELFYQIGLTDFANFGKINLQSTNVSDDIVLYNLLSEFDELNDDASKEKIISKIWDMSSMLNEYYSIELVNDGLDNDLKSVKLKSLPLLLKGYIPSLVKLPFFIYRLGKEVDWEDEQECLDGILREIALLYIPDMVPKVDTLDASLSEDEKAQFINRKEHISSLLEHVLFPCIKRRFLAPRHILKDVVEIANLPDLYKVFERC

SEQ ID NO: 474 - protein, 769 aa, Artificial sequence
  hybrid human-yeast MLH1 protein with single amino acid variation
MSLRIKALDASVVNKIAAGEIIISPVNALKEMMENSIDAKSTSIQVIVKEGGLKLIQIQDNGTGIRKEDLDIVCERFTTFKLQKFEDLSQIQTYGFRGEALASISHVARVTVTTKVKEDRCAWRVSYAEGKMLESPKPVAGKDGTTILVEDLFFNIPSRLRALRSHNDEYSKILDVVGRYAIHSKDIGFSCKKFGDSNYSLSVKPSYTVQDRIRTVFNKSVASNLITFHISKVEDLNLESVDGKVCNLNFISKKSISLIFFINNRLVTCDLLRRALNSVYSNYLPKGFRPFIYLGIVIDPAAVDVNVHPTKREVRFLSQDEIIEKIANQLHAELSAIDTSRTFKASSISTNKPESLIPFNDTIESDRNRKSLRQAQVVENSYTTANSQLRKAKRQENKLVRIDASQAKITSFLSSSQQFNFEGSSTKRQLSEPKVTNVSHSQEAEKLTLNESEQPRDANTINDNDLKDQPKKKQKLGDYKVPSIADDEKNALPISKDGYIRVPKERVNVNLTSIKKLREKVDDSIHRELTDIFANLNYVGVVDEERRLAAIQHDLKLFLIDYGSVCYELFYQIGLTDFANFGKINLQSTNVSDDIVLYNLLSEFDELNDDASKEKIISKIWDMSSMLNEYYSIELVNDGLDNDLKSVKLKSLPLLLKGYIPSLVKLPFFIYRLGKEVDWEDEQECLDGILREIALLYIPDMVPKVDTLDASLSEDEKAQFINRKEHISSLLEHVLFPCIKRRFLAPRHILKDVVEIANLPDLYKVFERC

SEQ ID NO: 475 - protein, 769 aa, Artificial sequence
  hybrid human-yeast MLH1 protein with single amino acid variation
MSLRIKALDASVVNKIAAGEIIISPVNALKEMMENSIDAKSTSIQVIVKEGGLKLIQIQDNGTGIRKEDLDIVCERFTTSRLQKFEDLSQIQTYGFRGEALASISHVARVTVTTKVKEDRCAWRVSYAEGKMLESPKPVAGKDGTTILVEDLFFNIPSRLRALRSHNDEYSKILDVVGRYAIHSKDIGFSCKKFGDSNYSLSVKPSYTVQDRIRTVFNKSVASNLITFHISKVEDLNLESVDGKVCNLNFISKKSISLIFFINNRLVTCDLLRRALNSVYSNYLPKGFRPFIYLGIVIDPAAVDVNVHPTKREVRFLSQDEIIEKIANQLHAELSAIDTSRTFKASSISTNKPESLIPFNDTIESDRNRKSLRQAQVVENSYTTANSQLRKAKRQENKLVRIDASQAKITSFLSSSQQFNFEGSSTKRQLSEPKVTNVSHSQEAEKLTLNESEQPRDANTINDNDLKDQPKKKQKLGDYKVPSIADDEKNALPISKDGYIRVPKERVNVNLTSIKKLREKVDDSIHRELTDIFANLNYVGVVDEERRLAAIQHDLKLFLIDYGSVCYELFYQIGLTDFANFGKINLQSTNVSDDIVLYNLLSEFDELNDDASKEKIISKIWDMSSMLNEYYSIELVNDGLDNDLKSVKLKSLPLLLKGYIPSLVKLPFFIYRLGKEVDWEDEQECLDGILREIALLYIPDMVPKVDTLDASLSEDEKAQFINRKEHISSLLEHVLFPCIKRRFLAPRHILKDVVEIANLPDLYKVFERC

SEQ ID NO: 476 - protein, 769 aa, Artificial sequence; identical to SEQ ID NO: 475
  hybrid human-yeast MLH1 protein with single amino acid variation

SEQ ID NO: 477 - protein, 769 aa, Artificial sequence
  hybrid human-yeast MLH1 protein with single amino acid variation
MSLRIKALDASVVNKIAAGEIIISPVNALKEMMENSIDAKSTSIQVIVKEGGLKLIQIQDNGTGIRKEDLDIVCERFTTSKSQKFEDLSQIQTYGFRGEALASISHVARVTVTTKVKEDRCAWRVSYAEGKMLESPKPVAGKDGTTILVEDLFFNIPSRLRALRSHNDEYSKILDVVGRYAIHSKDIGFSCKKFGDSNYSLSVKPSYTVQDRIRTVFNKSVASNLITFHISKVEDLNLESVDGKVCNLNFISKKSISLIFFINNRLVTCDLLRRALNSVYSNYLPKGFRPFIYLGIVIDPAAVDVNVHPTKREVRFLSQDEIIEKIANQLHAELSAIDTSRTFKASSISTNKPESLIPFNDTIESDRNRKSLRQAQVVENSYTTANSQLRKAKRQENKLVRIDASQAKITSFLSSSQQFNFEGSSTKRQLSEPKVTNVSHSQEAEKLTLNESEQPRDANTINDNDLKDQPKKKQKLGDYKVPSIADDEKNALPISKDGYIRVPKERVNVNLTSIKKLREKVDDSIHRELTDIFANLNYVGVVDEERRLAAIQHDLKLFLIDYGSVCYELFYQIGLTDFANFGKINLQSTNVSDDIVLYNLLSEFDELNDDASKEKIISKIWDMSSMLNEYYSIELVNDGLDNDLKSVKLKSLPLLLKGYIPSLVKLPFFIYRLGKEVDWEDEQECLDGILREIALLYIPDMVPKVDTLDASLSEDEKAQFINRKEHISSLLEHVLFPCIKRRFLAPRHILKDVVEIANLPDLYKVFERC

SEQ ID NO: 478 - protein, 769 aa, Artificial sequence
  hybrid human-yeast MLH1 protein with single amino acid variation
MSLRIKALDASVVNKIAAGEIIISPVNALKEMMENSIDAKSTSIQVIVKEGGLKLIQIQDNGTGIRKEDLDIVCERFTTSKLQKFGDLSQIQTYGFRGEALASISHVARVTVTTKVKEDRCAWRVSYAEGKMLESPKPVAGKDGTTILVEDLFFNIPSRLRALRSHNDEYSKILDVVGRYAIHSKDIGFSCKKFGDSNYSLSVKPSYTVQDRIRTVFNKSVASNLITFHISKVEDLNLESVDGKVCNLNFISKKSISLIFFINNRLVTCDLLRRALNSVYSNYLPKGFRPFIYLGIVIDPAAVDVNVHPTKREVRFLSQDEIIEKIANQLHAELSAIDTSRTFKASSISTNKPESLIPFNDTIESDRNRKSLRQAQVVENSYTTANSQLRKAKRQENKLVRIDASQAKITSFLSSSQQFNFEGSSTKRQLSEPKVTNVSHSQEAEKLTLNESEQPRDANTINDNDLKDQPKKKQKLGDYKVPSIADDEKNALPISKDGYIRVPKERVNVNLTSIKKLREKVDDSIHRELTDIFANLNYVGVVDEERRLAAIQHDLKLFLIDYGSVCYELFYQIGLTDFANFGKINLQSTNVSDDIVLYNLLSEFDELNDDASKEKIISKIWDMSSMLNEYYSIELVNDGLDNDLKSVKLKSLPLLLKGYIPSLVKLPFFIYRLGKEVDWEDEQECLDGILREIALLYIPDMVPKVDTLDASLSEDEKAQFINRKEHISSLLEHVLFPCIKRRFLAPRHILKDVVEIANLPDLYKVFERC

SEQ ID NO: 479 - protein, 769 aa, Artificial sequence
  hybrid human-yeast MLH1 protein with single amino acid variation
MSLRIKALDASVVNKIAAGEIIISPVNALKEMMENSIDAKSTSIQVIVKEGGLKLIQIQDNGTGIRKEDLDIVCERFTTSKLQKFEDVSQIQTYGFRGEALASISHVARVTVTTKVKEDRCAWRVSYAEGKMLESPKPVAGKDGTTILVEDLFFNIPSRLRALRSHNDEYSKILDVVGRYAIHSKDIGFSCKKFGDSNYSLSVKPSYTVQDRIRTVFNKSVASNLITFHISKVEDLNLESVDGKVCNLNFISKKSISLIFFINNRLVTCDLLRRALNSVYSNYLPKGFRPFIYLGIVIDPAAVDVNVHPTKREVRFLSQDEIIEKIANQLHAELSAIDTSRTFKASSISTNKPESLIPFNDTIESDRNRKSLRQAQVVENSYTTANSQLRKAKRQENKLVRIDASQAKITSFLSSSQQFNFEGSSTKRQLSEPKVTNVSHSQEAEKLTLNESEQPRDANTINDNDLKDQPKKKQKLGDYKVPSIADDEKNALPISKDGYIRVPKERVNVNLTSIKKLREKVDDSIHRELTDIFANLNYVGVVDEERRLAAIQHDLKLFLIDYGSVCYELFYQIGLTDFANFGKINLQSTNVSDDIVLYNLLSEFDELNDDASKEKIISKIWDMSSMLNEYYSIELVNDGLDNDLKSVKLKSLPLLLKGYIPSLVKLPFFIYRLGKEVDWEDEQECLDGILREIALLYIPDMVPKVDTLDASLSEDEKAQFINRKEHISSLLEHVLFPCIKRRFLAPRHILKDVVEIANLPDLYKVFERC

SEQ ID NO: 480 - protein, 769 aa, Artificial sequence
  hybrid human-yeast MLH1 protein with single amino acid variation
MSLRIKALDASVVNKIAAGEIIISPVNALKEMMENSIDAKSTSIQVIVKEGGLKLIQIQDNGTGIRKEDLDIVCERFTTSKLQKFEDLSQIQTYGFRGGALASISHVARVTVTTKVKEDRCAWRVSYAEGKMLESPKPVAGKDGTTILVEDLFFNIPSRLRALRSHNDEYSKILDVVGRYAIHSKDIGFSCKKFGDSNYSLSVKPSYTVQDRIRTVFNKSVASNLITFHISKVEDLNLESVDGKVCNLNFISKKSISLIFFINNRLVTCDLLRRALNSVYSNYLPKGFRPFIYLGIVIDPAAVDVNVHPTKREVRFLSQDEIIEKIANQLHAELSAIDTSRTFKASSISTNKPESLIPFNDTIESDRNRKSLRQAQVVENSYTTANSQLRKAKRQENKLVRIDASQAKITSFLSSSQQFNFEGSSTKRQLSEPKVTNVSHSQEAEKLTLNESEQPRDANTINDNDLKDQPKKKQKLGDYKVPSIADDEKNALPISKDGYIRVPKERVNVNLTSIKKLREKVDDSIHRELTDIFANLNYVGVVDEERRLAAIQHDLKLFLIDYGSVCYELFYQIGLTDFANFGKINLQSTNVSDDIVLYNLLSEFDELNDDASKEKIISKIWDMSSMLNEYYSIELVNDGLDNDLKSVKLKSLPLLLKGYIPSLVKLPFFIYRLGKEVDWEDEQECLDGILREIALLYIPDMVPKVDTLDASLSEDEKAQFINRKEHISSLLEHVLFPCIKRRFLAPRHILKDVVEIANLPDLYKVFERC

SEQ ID NO: 481 - protein, 769 aa, Artificial sequence
  hybrid human-yeast MLH1 protein with single amino acid variation
MSLRIKALDASVVNKIAAGEIIISPVNALKEMMENSIDAKSTSIQVIVKEGGLKLIQIQDNGTGIRKEDLDIVCERFTTSKLQKFEDLSQIQTYGFRGEALASISHVPRVTVTTKVKEDRCAWRVSYAEGKMLESPKPVAGKDGTTILVEDLFFNIPSRLRALRSHNDEYSKILDVVGRYAIHSKDIGFSCKKFGDSNYSLSVKPSYTVQDRIRTVFNKSVASNLITFHISKVEDLNLESVDGKVCNLNFISKKSISLIFFINNRLVTCDLLRRALNSVYSNYLPKGFRPFIYLGIVIDPAAVDVNVHPTKREVRFLSQDEIIEKIANQLHAELSAIDTSRTFKASSISTNKPESLIPFNDTIESDRNRKSLRQAQVVENSYTTANSQLRKAKRQENKLVRIDASQAKITSFLSSSQQFNFEGSSTKRQLSEPKVTNVSHSQEAEKLTLNESEQPRDANTINDNDLKDQPKKKQKLGDYKVPSIADDEKNALPISKDGYIRVPKERVNVNLTSIKKLREKVDDSIHRELTDIFANLNYVGVVDEERRLAAIQHDLKLFLIDYGSVCYELFYQIGLTDFANFGKINLQSTNVSDDIVLYNLLSEFDELNDDASKEKIISKIWDMSSMLNEYYSIELVNDGLDNDLKSVKLKSLPLLLKGYIPSLVKLPFFIYRLGKEVDWEDEQECLDGILREIALLYIPDMVPKVDTLDASLSEDEKAQFINRKEHISSLLEHVLFPCIKRRFLAPRHILKDVVEIANLPDLYKVFERC

SEQ ID NO: 482 - protein, 769 aa, Artificial sequence
  hybrid human-yeast MLH1 protein with single amino acid variation
MSLRIKALDASVVNKIAAGEIIISPVNALKEMMENSIDAKSTSIQVIVKEGGLKLIQIQDNGTGIRKEDLDIVCERFTTSKLQKFEDLSQIQTYGFRGEALASISHVARATVTTKVKEDRCAWRVSYAEGKMLESPKPVAGKDGTTILVEDLFFNIPSRLRALRSHNDEYSKILDVVGRYAIHSKDIGFSCKKFGDSNYSLSVKPSYTVQDRIRTVFNKSVASNLITFHISKVEDLNLESVDGKVCNLNFISKKSISLIFFINNRLVTCDLLRRALNSVYSNYLPKGFRPFIYLGIVIDPAAVDVNVHPTKREVRFLSQDEIIEKIANQLHAELSAIDTSRTFKASSISTNKPESLIPFNDTIESDRNRKSLRQAQVVENSYTTANSQLRKAKRQENKLVRIDASQAKITSFLSSSQQFNFEGSSTKRQLSEPKVTNVSHSQEAEKLTLNESEQPRDANTINDNDLKDQPKKKQKLGDYKVPSIADDEKNALPISKDGYIRVPKERVNVNLTSIKKLREKVDDSIHRELTDIFANLNYVGVVDEERRLAAIQHDLKLFLIDYGSVCYELFYQIGLTDFANFGKINLQSTNVSDDIVLYNLLSEFDELNDDASKEKIISKIWDMSSMLNEYYSIELVNDGLDNDLKSVKLKSLPLLLKGYIPSLVKLPFFIYRLGKEVDWEDEQECLDGILREIALLYIPDMVPKVDTLDASLSEDEKAQFINRKEHISSLLEHVLFPCIKRRFLAPRHILKDVVEIANLPDLYKVFERC

SEQ ID NO: 483 - protein, 769 aa, Artificial sequence
  hybrid human-yeast MLH1 protein with single amino acid variation
MSLRIKALDASVVNKIAAGEIIISPVNALKEMMENSIDAKSTSIQVIVKEGGLKLIQIQDNGTGIRKEDLDIVCERFTTSKLQKFEDLSQIQTYGFRGEALASISHVARVTETTKVKEDRCAWRVSYAEGKMLESPKPVAGKDGTTILVEDLFFNIPSRLRALRSHNDEYSKILDVVGRYAIHSKDIGFSCKKFGDSNYSLSVKPSYTVQDRIRTVFNKSVASNLITFHISKVEDLNLESVDGKVCNLNFISKKSISLIFFINNRLVTCDLLRRALNSVYSNYLPKGFRPFIYLGIVIDPAAVDVNVHPTKREVRFLSQDEIIEKIANQLHAELSAIDTSRTFKASSISTNKPESLIPFNDTIESDRNRKSLRQAQVVENSYTTANSQLRKAKRQENKLVRIDASQAKITSFLSSSQQFNFEGSSTKRQLSEPKVTNVSHSQEAEKLTLNESEQPRDANTINDNDLKDQPKKKQKLGDYKVPSIADDEKNALPISKDGYIRVPKERVNVNLTSIKKLREKVDDSIHRELTDIFANLNYVGVVDEERRLAAIQHDLKLFLIDYGSVCYELFYQIGLTDFANFGKINLQSTNVSDDIVLYNLLSEFDELNDDASKEKIISKIWDMSSMLNEYYSIELVNDGLDNDLKSVKLKSLPLLLKGYIPSLVKLPFFIYRLGKEVDWEDEQECLDGILREIALLYIPDMVPKVDTLDASLSEDEKAQFINRKEHISSLLEHVLFPCIKRRFLAPRHILKDVVEIANLPDLYKVFERC

SEQ ID NO: 484 - protein, 769 aa, Artificial sequence
  hybrid human-yeast MLH1 protein with single amino acid variation
MSLRIKALDASVVNKIAAGEIIISPVNALKEMMENSIDAKSTSIQVIVKEGGLKLIQIQDNGTGIRKEDLDIVCERFTTSKLQKFEDLSQIQTYGFRGEALASISHVARVTVATKVKEDRCAWRVSYAEGKMLESPKPVAGKDGTTILVEDLFFNIPSRLRALRSHNDEYSKILDVVGRYAIHSKDIGFSCKKFGDSNYSLSVKPSYTVQDRIRTVFNKSVASNLITFHISKVEDLNLESVDGKVCNLNFISKKSISLIFFINNRLVTCDLLRRALNSVYSNYLPKGFRPFIYLGIVIDPAAVDVNVHPTKREVRFLSQDEIIEKIANQLHAELSAIDTSRTFKASSISTNKPESLIPFNDTIESDRNRKSLRQAQVVENSYTTANSQLRKAKRQENKLVRIDASQAKITSFLSSSQQFNFEGSSTKRQLSEPKVTNVSHSQEAEKLTLNESEQPRDANTINDNDLKDQPKKKQKLGDYKVPSIADDEKNALPISKDGYIRVPKERVNVNLTSIKKLREKVDDSIHRELTDIFANLNYVGVVDEERRLAAIQHDLKLFLIDYGSVCYELFYQIGLTDFANFGKINLQSTNVSDDIVLYNLLSEFDELNDDASKEKIISKIWDMSSMLNEYYSIELVNDGLDNDLKSVKLKSLPLLLKGYIPSLVKLPFFIYRLGKEVDWEDEQECLDGILREIALLYIPDMVPKVDTLDASLSEDEKAQFINRKEHISSLLEHVLFPCIKRRFLAPRHILKDVVEIANLPDLYKVFERC

SEQ ID NO: 485 - protein, 769 aa, Artificial sequence
  hybrid human-yeast MLH1 protein with single amino acid variation
MSLRIKALDASVVNKIAAGEIIISPVNALKEMMENSIDAKSTSIQVIVKEGGLKLIQIQDNGTGIRKEDLDIVCERFTTSKLQKFEDLSQIQTYGFRGEALASISHVARVTVTTKVKEDRCAWRVSYAEGKMLESPKPVAGKDSTTILVEDLFFNIPSRLRALRSHNDEYSKILDVVGRYAIHSKDIGFSCKKFGDSNYSLSVKPSYTVQDRIRTVFNKSVASNLITFHISKVEDLNLESVDGKVCNLNFISKKSISLIFFINNRLVTCDLLRRALNSVYSNYLPKGFRPFIYLGIVIDPAAVDVNVHPTKREVRFLSQDEIIEKIANQLHAELSAIDTSRTFKASSISTNKPESLIPFNDTIESDRNRKSLRQAQVVENSYTTANSQLRKAKRQENKLVRIDASQAKITSFLSSSQQFNFEGSSTKRQLSEPKVTNVSHSQEAEKLTLNESEQPRDANTINDNDLKDQPKKKQKLGDYKVPSIADDEKNALPISKDGYIRVPKERVNVNLTSIKKLREKVDDSIHRELTDIFANLNYVGVVDEERRLAAIQHDLKLFLIDYGSVCYELFYQIGLTDFANFGKINLQSTNVSDDIVLYNLLSEFDELNDDASKEKIISKIWDMSSMLNEYYSIELVNDGLDNDLKSVKLKSLPLLLKGYIPSLVKLPFFIYRLGKEVDWEDEQECLDGILREIALLYIPDMVPKVDTLDASLSEDEKAQFINRKEHISSLLEHVLFPCIKRRFLAPRHILKDVVEIANLPDLYKVFERC

SEQ ID NO: 486 - protein, 769 aa, Artificial sequence
  hybrid human-yeast MLH1 protein with single amino acid variation
MSLRIKALDASVVNKIAAGEIIISPVNALNEMMENSIDANATMIDILVKEGGIKVLQITDNGSGINKADLPILCERFTTSKLQSFEDLASISTYGFRGEALASISHVAHVTITTKTADGKCAYRASYSDGKMLESPKPVAGKDGTTILVEDLFFNIPSRLRALRSHNDEYSKILDVVGRYAIHSKDIGFSCKKFGDSNYSLSVKPSYTVQDRIRTVFNKSVASNLITFHISKVEDLNLESVDGKVCNLNFISKKSISLIFFINNRLVTCDLLRRALNSVYSNYLPKGFRPFIYLGIVIDPAAVDVNVHPTKREVRFLSQDEIIEKIANQLHAELSAIDTSRTFKASSISTNKPESLIPFNDTIESDRNRKSLRQAQVVENSYTTANSQLRKAKRQENKLVRIDASQAKITSFLSSSQQFNFEGSSTKRQLSEPKVTNVSHSQEAEKLTLNESEQPRDANTINDNDLKDQPKKKQKLGDYKVPSIADDEKNALPISKDGYIRVPKERVNVNLTSIKKLREKVDDSIHRELTDIFANLNYVGVVDEERRLAAIQHDLKLFLIDYGSVCYELFYQIGLTDFANFGKINLQSTNVSDDIVLYNLLSEFDELNDDASKEKIISKIWDMSSMLNEYYSIELVNDGLDNDLKSVKLKSLPLLLKGYIPSLVKLPFFIYRLGKEVDWEDEQECLDGILREIALLYIPDMVPKVDTLDASLSEDEKAQFINRKEHISSLLEHVLFPCIKRRFLAPRHILKDVVEIANLPDLYKVFERC

SEQ ID NO: 487 - protein, 769 aa, Artificial sequence
  hybrid human-yeast MLH1 protein with single amino acid variation
MSLRIKALDASVVNKIAAGEIIISPVNALKEMMESSIDANATMIDILVKEGGIKVLQITDNGSGINKADLPILCERFTTSKLQSFEDLASISTYGFRGEALASISHVAHVTITTKTADGKCAYRASYSDGKMLESPKPVAGKDGTTILVEDLFFNIPSRLRALRSHNDEYSKILDVVGRYAIHSKDIGFSCKKFGDSNYSLSVKPSYTVQDRIRTVFNKSVASNLITFHISKVEDLNLESVDGKVCNLNFISKKSISLIFFINNRLVTCDLLRRALNSVYSNYLPKGFRPFIYLGIVIDPAAVDVNVHPTKREVRFLSQDEIIEKIANQLHAELSAIDTSRTFKASSISTNKPESLIPFNDTIESDRNRKSLRQAQVVENSYTTANSQLRKAKRQENKLVRIDASQAKITSFLSSSQQFNFEGSSTKRQLSEPKVTNVSHSQEAEKLTLNESEQPRDANTINDNDLKDQPKKKQKLGDYKVPSIADDEKNALPISKDGYIRVPKERVNVNLTSIKKLREKVDDSIHRELTDIFANLNYVGVVDEERRLAAIQHDLKLFLIDYGSVCYELFYQIGLTDFANFGKINLQSTNVSDDIVLYNLLSEFDELNDDASKEKIISKIWDMSSMLNEYYSIELVNDGLDNDLKSVKLKSLPLLLKGYIPSLVKLPFFIYRLGKEVDWEDEQECLDGILREIALLYIPDMVPKVDTLDASLSEDEKAQFINRKEHISSLLEHVLFPCIKRRFLAPRHILKDVVEIANLPDLYKVFERC

SEQ ID NO: 488 - protein, 769 aa, Artificial sequence
  hybrid human-yeast MLH1 protein with single amino acid variation
MSLRIKALDASVVNKIAAGEIIISPVNALKEMMENSFDANATMIDILVKEGGIKVLQITDNGSGINKADLPILCERFTTSKLQSFEDLASISTYGFRGEALASISHVAHVTITTKTADGKCAYRASYSDGKMLESPKPVAGKDGTTILVEDLFFNIPSRLRALRSHNDEYSKILDVVGRYAIHSKDIGFSCKKFGDSNYSLSVKPSYTVQDRIRTVFNKSVASNLITFHISKVEDLNLESVDGKVCNLNFISKKSISLIFFINNRLVTCDLLRRALNSVYSNYLPKGFRPFIYLGIVIDPAAVDVNVHPTKREVRFLSQDEIIEKIANQLHAELSAIDTSRTFKASSISTNKPESLIPFNDTIESDRNRKSLRQAQVVENSYTTANSQLRKAKRQENKLVRIDASQAKITSFLSSSQQFNFEGSSTKRQLSEPKVTNVSHSQEAEKLTLNESEQPRDANTINDNDLKDQPKKKQKLGDYKVPSIADDEKNALPISKDGYIRVPKERVNVNLTSIKKLREKVDDSIHRELTDIFANLNYVGVVDEERRLAAIQHDLKLFLIDYGSVCYELFYQIGLTDFANFGKINLQSTNVSDDIVLYNLLSEFDELNDDASKEKIISKIWDMSSMLNEYYSIELVNDGLDNDLKSVKLKSLPLLLKGYIPSLVKLPFFIYRLGKEVDWEDEQECLDGILREIALLYIPDMVPKVDTLDASLSEDEKAQFINRKEHISSLLEHVLFPCIKRRFLAPRHILKDVVEIANLPDLYKVFERC

SEQ ID NO: 489 - protein, 769 aa, Artificial sequence
  hybrid human-yeast MLH1 protein with single amino acid variation
MSLRIKALDASVVNKIAAGEIIISPVNALKEMMENSTDANATMIDILVKEGGIKVLQITDNGSGINKADLPILCERFTTSKLQSFEDLASISTYGFRGEALASISHVAHVTITTKTADGKCAYRASYSDGKMLESPKPVAGKDGTTILVEDLFFNIPSRLRALRSHNDEYSKILDVVGRYAIHSKDIGFSCKKFGDSNYSLSVKPSYTVQDRIRTVFNKSVASNLITFHISKVEDLNLESVDGKVCNLNFISKKSISLIFFINNRLVTCDLLRRALNSVYSNYLPKGFRPFIYLGIVIDPAAVDVNVHPTKREVRFLSQDEIIEKIANQLHAELSAIDTSRTFKASSISTNKPESLIPFNDTIESDRNRKSLRQAQVVENSYTTANSQLRKAKRQENKLVRIDASQAKITSFLSSSQQFNFEGSSTKRQLSEPKVTNVSHSQEAEKLTLNESEQPRDANTINDNDLKDQPKKKQKLGDYKVPSIADDEKNALPISKDGYIRVPKERVNVNLTSIKKLREKVDDSIHRELTDIFANLNYVGVVDEERRLAAIQHDLKLFLIDYGSVCYELFYQIGLTDFANFGKINLQSTNVSDDIVLYNLLSEFDELNDDASKEKIISKIWDMSSMLNEYYSIELVNDGLDNDLKSVKLKSLPLLLKGYIPSLVKLPFFIYRLGKEVDWEDEQECLDGILREIALLYIPDMVPKVDTLDASLSEDEKAQFINRKEHISSLLEHVLFPCIKRRFLAPRHILKDVVEIANLPDLYKVFERC

SEQ ID NO: 490 - protein, 769 aa, Artificial sequence
  hybrid human-yeast MLH1 protein with single amino acid variation
MSLRIKALDASVVNKIAAGEIIISPVNALKEMMENSIGANATMIDILVKEGGIKVLQITDNGSGINKADLPILCERFTTSKLQSFEDLASISTYGFRGEALASISHVAHVTITTKTADGKCAYRASYSDGKMLESPKPVAGKDGTTILVEDLFFNIPSRLRALRSHNDEYSKILDVVGRYAIHSKDIGFSCKKFGDSNYSLSVKPSYTVQDRIRTVFNKSVASNLITFHISKVEDLNLESVDGKVCNLNFISKKSISLIFFINNRLVTCDLLRRALNSVYSNYLPKGFRPFIYLGIVIDPAAVDVNVHPTKREVRFLSQDEIIEKIANQLHAELSAIDTSRTFKASSISTNKPESLIPFNDTIESDRNRKSLRQAQVVENSYTTANSQLRKAKRQENKLVRIDASQAKITSFLSSSQQFNFEGSSTKRQLSEPKVTNVSHSQEAEKLTLNESEQPRDANTINDNDLKDQPKKKQKLGDYKVPSIADDEKNALPISKDGYIRVPKERVNVNLTSIKKLREKVDDSIHRELTDIFANLNYVGVVDEERRLAAIQHDLKLFLIDYGSVCYELFYQIGLTDFANFGKINLQSTNVSDDIVLYNLLSEFDELNDDASKEKIISKIWDMSSMLNEYYSIELVNDGLDNDLKSVKLKSLPLLLKGYIPSLVKLPFFIYRLGKEVDWEDEQECLDGILREIALLYIPDMVPKVDTLDASLSEDEKAQFINRKEHISSLLEHVLFPCIKRRFLAPRHILKDVVEIANLPDLYKVFERC

SEQ ID NO: 491 - protein, 769 aa, Artificial sequence
  hybrid human-yeast MLH1 protein with single amino acid variation
MSLRIKALDASVVNKIAAGEIIISPVNALKEMMENSIEANATMIDILVKEGGIKVLQITDNGSGINKADLPILCERFTTSKLQSFEDLASISTYGFRGEALASISHVAHVTITTKTADGKCAYRASYSDGKMLESPKPVAGKDGTTILVEDLFFNIPSRLRALRSHNDEYSKILDVVGRYAIHSKDIGFSCKKFGDSNYSLSVKPSYTVQDRIRTVFNKSVASNLITFHISKVEDLNLESVDGKVCNLNFISKKSISLIFFINNRLVTCDLLRRALNSVYSNYLPKGFRPFIYLGIVIDPAAVDVNVHPTKREVRFLSQDEIIEKIANQLHAELSAIDTSRTFKASSISTNKPESLIPFNDTIESDRNRKSLRQAQVVENSYTTANSQLRKAKRQENKLVRIDASQAKITSFLSSSQQFNFEGSSTKRQLSEPKVTNVSHSQEAEKLTLNESEQPRDANTINDNDLKDQPKKKQKLGDYKVPSIADDEKNALPISKDGYIRVPKERVNVNLTSIKKLREKVDDSIHRELTDIFANLNYVGVVDEERRLAAIQHDLKLFLIDYGSVCYELFYQIGLTDFANFGKINLQSTNVSDDIVLYNLLSEFDELNDDASKEKIISKIWDMSSMLNEYYSIELVNDGLDNDLKSVKLKSLPLLLKGYIPSLVKLPFFIYRLGKEVDWEDEQECLDGILREIALLYIPDMVPKVDTLDASLSEDEKAQFINRKEHISSLLEHVLFPCIKRRFLAPRHILKDVVEIANLPDLYKVFERC

SEQ ID NO: 492 - protein, 769 aa, Artificial sequence
  hybrid human-yeast MLH1 protein with single amino acid variation
MSLRIKALDASVVNKIAAGEIIISPVNALKEMMENSINANATMIDILVKEGGIKVLQITDNGSGINKADLPILCERFTTSKLQSFEDLASISTYGFRGEALASISHVAHVTITTKTADGKCAYRASYSDGKMLESPKPVAGKDGTTILVEDLFFNIPSRLRALRSHNDEYSKILDVVGRYAIHSKDIGFSCKKFGDSNYSLSVKPSYTVQDRIRTVFNKSVASNLITFHISKVEDLNLESVDGKVCNLNFISKKSISLIFFINNRLVTCDLLRRALNSVYSNYLPKGFRPFIYLGIVIDPAAVDVNVHPTKREVRFLSQDEIIEKIANQLHAELSAIDTSRTFKASSISTNKPESLIPFNDTIESDRNRKSLRQAQVVENSYTTANSQLRKAKRQENKLVRIDASQAKITSFLSSSQQFNFEGSSTKRQLSEPKVTNVSHSQEAEKLTLNESEQPRDANTINDNDLKDQPKKKQKLGDYKVPSIADDEKNALPISKDGYIRVPKERVNVNLTSIKKLREKVDDSIHRELTDIFANLNYVGVVDEERRLAAIQHDLKLFLIDYGSVCYELFYQIGLTDFANFGKINLQSTNVSDDIVLYNLLSEFDELNDDASKEKIISKIWDMSSMLNEYYSIELVNDGLDNDLKSVKLKSLPLLLKGYIPSLVKLPFFIYRLGKEVDWEDEQECLDGILREIALLYIPDMVPKVDTLDASLSEDEKAQFINRKEHISSLLEHVLFPCIKRRFLAPRHILKDVVEIANLPDLYKVFERC

SEQ ID NO: 493 - protein, 769 aa, Artificial sequence
  hybrid human-yeast MLH1 protein with single amino acid variation
MSLRIKALDASVVNKIAAGEIIISPVNALKEMMENSIDANVTMIDILVKEGGIKVLQITDNGSGINKADLPILCERFTTSKLQSFEDLASISTYGFRGEALASISHVAHVTITTKTADGKCAYRASYSDGKMLESPKPVAGKDGTTILVEDLFFNIPSRLRALRSHNDEYSKILDVVGRYAIHSKDIGFSCKKFGDSNYSLSVKPSYTVQDRIRTVFNKSVASNLITFHISKVEDLNLESVDGKVCNLNFISKKSISLIFFINNRLVTCDLLRRALNSVYSNYLPKGFRPFIYLGIVIDPAAVDVNVHPTKREVRFLSQDEIIEKIANQLHAELSAIDTSRTFKASSISTNKPESLIPFNDTIESDRNRKSLRQAQVVENSYTTANSQLRKAKRQENKLVRIDASQAKITSFLSSSQQFNFEGSSTKRQLSEPKVTNVSHSQEAEKLTLNESEQPRDANTINDNDLKDQPKKKQKLGDYKVPSIADDEKNALPISKDGYIRVPKERVNVNLTSIKKLREKVDDSIHRELTDIFANLNYVGVVDEERRLAAIQHDLKLFLIDYGSVCYELFYQIGLTDFANFGKINLQSTNVSDDIVLYNLLSEFDELNDDASKEKIISKIWDMSSMLNEYYSIELVNDGLDNDLKSVKLKSLPLLLKGYIPSLVKLPFFIYRLGKEVDWEDEQECLDGILREIALLYIPDMVPKVDTLDASLSEDEKAQFINRKEHISSLLEHVLFPCIKRRFLAPRHILKDVVEIANLPDLYKVFERC

SEQ ID NO: 494 - protein, 649 aa, Artificial sequence
  hybrid human-yeast MLH1 protein with single amino acid variation
CAYRASYSDGKMLESPKPVAGKDGTTILVEDLFFNIPSRLRALRSHNDEYSKILDVVGRYAIHSKDIGFSCKKFGDSNYSLSVKPSYTVQDRIRTVFNKSVASNLITFHISKVEDLNLESVDGKVCNLNFISKKSISLIFFINNRLVTCDLLRRALNSVYSNYLPKGFRPFIYLGIVIDPAAVDVNVHPTKREVRFLSQDEIIEKIANQLHAELSAIDTSRTFKASSISTNKPESLIPFNDTIESDRNRKSLRQAQVVENSYTTANSQLRKAKRQENKLVRIDASQAKITSFLSSSQQFNFEGSSTKRQLSEPKVTNVSHSQEAEKLTLNESEQPRDANTINDNDLKDQPKKKQKLGDYKVPSIADDEKNALPISKDGYIRVPKERVNVNLTSIKKLREKVDDSIHRELTDIFANLNYVGVVDEERRLAAIQHDLKLFLIDYGSVCYELFYQIGLTDFANFGKINLQSTNVSDDIVLYNLLSEFDELNDDASKEKIISKIWDMSSMLNEYYSIELVNDGLDNDLKSVKLKSLPLLLKGYIPSLVKLPFFIYRLGKEVDWEDEQECLDGILREIALLYIPDMVPKVDTLDASLSEDEKAQFINRKEHISSLLEHVLFPCIKRRFLAPRHILKDVVEIANLPDLYKVFERC

SEQ ID NO: 495 - protein, 769 aa, Artificial sequence
  hybrid human-yeast MLH1 protein with single amino acid variation
MSLRIKALDASVVNKIAAGEIIISPVNALKEMMENSIDANAIMIDILVKEGGIKVLQITDNGSGINKADLPILCERFTTSKLQSFEDLASISTYGFRGEALASISHVAHVTITTKTADGKCAYRASYSDGKMLESPKPVAGKDGTTILVEDLFFNIPSRLRALRSHNDEYSKILDVVGRYAIHSKDIGFSCKKFGDSNYSLSVKPSYTVQDRIRTVFNKSVASNLITFHISKVEDLNLESVDGKVCNLNFISKKSISLIFFINNRLVTCDLLRRALNSVYSNYLPKGFRPFIYLGIVIDPAAVDVNVHPTKREVRFLSQDEIIEKIANQLHAELSAIDTSRTFKASSISTNKPESLIPFNDTIESDRNRKSLRQAQVVENSYTTANSQLRKAKRQENKLVRIDASQAKITSFLSSSQQFNFEGSSTKRQLSEPKVTNVSHSQEAEKLTLNESEQPRDANTINDNDLKDQPKKKQKLGDYKVPSIADDEKNALPISKDGYIRVPKERVNVNLTSIKKLREKVDDSIHRELTDIFANLNYVGVVDEERRLAAIQHDLKLFLIDYGSVCYELFYQIGLTDFANFGKINLQSTNVSDDIVLYNLLSEFDELNDDASKEKIISKIWDMSSMLNEYYSIELVNDGLDNDLKSVKLKSLPLLLKGYIPSLVKLPFFIYRLGKEVDWEDEQECLDGILREIALLYIPDMVPKVDTLDASLSEDEKAQFINRKEHISSLLEHVLFPCIKRRFLAPRHILKDVVEIANLPDLYKVFERC

SEQ ID NO: 496 - protein, 769 aa, Artificial sequence
  hybrid human-yeast MLH1 protein with single amino acid variation
MSLRIKALDASVVNKIAAGEIIISPVNALKEMMENSIDANATMIGILVKEGGIKVLQITDNGSGINKADLPILCERFTTSKLQSFEDLASISTYGFRGEALASISHVAHVTITTKTADGKCAYRASYSDGKMLESPKPVAGKDGTTILVEDLFFNIPSRLRALRSHNDEYSKILDVVGRYAIHSKDIGFSCKKFGDSNYSLSVKPSYTVQDRIRTVFNKSVASNLITFHISKVEDLNLESVDGKVCNLNFISKKSISLIFFINNRLVTCDLLRRALNSVYSNYLPKGFRPFIYLGIVIDPAAVDVNVHPTKREVRFLSQDEIIEKIANQLHAELSAIDTSRTFKASSISTNKPESLIPFNDTIESDRNRKSLRQAQVVENSYTTANSQLRKAKRQENKLVRIDASQAKITSFLSSSQQFNFEGSSTKRQLSEPKVTNVSHSQEAEKLTLNESEQPRDANTINDNDLKDQPKKKQKLGDYKVPSIADDEKNALPISKDGYIRVPKERVNVNLTSIKKLREKVDDSIHRELTDIFANLNYVGVVDEERRLAAIQHDLKLFLIDYGSVCYELFYQIGLTDFANFGKINLQSTNVSDDIVLYNLLSEFDELNDDASKEKIISKIWDMSSMLNEYYSIELVNDGLDNDLKSVKLKSLPLLLKGYIPSLVKLPFFIYRLGKEVDWEDEQECLDGILREIALLYIPDMVPKVDTLDASLSEDEKAQFINRKEHISSLLEHVLFPCIKRRFLAPRHILKDVVEIANLPDLYKVFERC

SEQ ID NO: 497 - protein, 769 aa, Artificial sequence
  hybrid human-yeast MLH1 protein with single amino acid variation
MSLRIKALDASVVNKIAAGEIIISPVNALKEMMENSIDANATMIDNLVKEGGIKVLQITDNGSGINKADLPILCERFTTSKLQSFEDLASISTYGFRGEALASISHVAHVTITTKTADGKCAYRASYSDGKMLESPKPVAGKDGTTILVEDLFFNIPSRLRALRSHNDEYSKILDVVGRYAIHSKDIGFSCKKFGDSNYSLSVKPSYTVQDRIRTVFNKSVASNLITFHISKVEDLNLESVDGKVCNLNFISKKSISLIFFINNRLVTCDLLRRALNSVYSNYLPKGFRPFIYLGIVIDPAAVDVNVHPTKREVRFLSQDEIIEKIANQLHAELSAIDTSRTFKASSISTNKPESLIPFNDTIESDRNRKSLRQAQVVENSYTTANSQLRKAKRQENKLVRIDASQAKITSFLSSSQQFNFEGSSTKRQLSEPKVTNVSHSQEAEKLTLNESEQPRDANTINDNDLKDQPKKKQKLGDYKVPSIADDEKNALPISKDGYIRVPKERVNVNLTSIKKLREKVDDSIHRELTDIFANLNYVGVVDEERRLAAIQHDLKLFLIDYGSVCYELFYQIGLTDFANFGKINLQSTNVSDDIVLYNLLSEFDELNDDASKEKIISKIWDMSSMLNEYYSIELVNDGLDNDLKSVKLKSLPLLLKGYIPSLVKLPFFIYRLGKEVDWEDEQECLDGILREIALLYIPDMVPKVDTLDASLSEDEKAQFINRKEHISSLLEHVLFPCIKRRFLAPRHILKDVVEIANLPDLYKVFERC

SEQ ID NO: 498 - protein, 769 aa, Artificial sequence
  hybrid human-yeast MLH1 protein with single amino acid variation
MSLRIKALDASVVNKIAAGEIIISPVNALKEMMENSIDANATMIDILVEEGGIKVLQITDNGSGINKADLPILCERFTTSKLQSFEDLASISTYGFRGEALASISHVAHVTITTKTADGKCAYRASYSDGKMLESPKPVAGKDGTTILVEDLFFNIPSRLRALRSHNDEYSKILDVVGRYAIHSKDIGFSCKKFGDSNYSLSVKPSYTVQDRIRTVFNKSVASNLITFHISKVEDLNLESVDGKVCNLNFISKKSISLIFFINNRLVTCDLLRRALNSVYSNYLPKGFRPFIYLGIVIDPAAVDVNVHPTKREVRFLSQDEIIEKIANQLHAELSAIDTSRTFKASSISTNKPESLIPFNDTIESDRNRKSLRQAQVVENSYTTANSQLRKAKRQENKLVRIDASQAKITSFLSSSQQFNFEGSSTKRQLSEPKVTNVSHSQEAEKLTLNESEQPRDANTINDNDLKDQPKKKQKLGDYKVPSIADDEKNALPISKDGYIRVPKERVNVNLTSIKKLREKVDDSIHRELTDIFANLNYVGVVDEERRLAAIQHDLKLFLIDYGSVCYELFYQIGLTDFANFGKINLQSTNVSDDIVLYNLLSEFDELNDDASKEKIISKIWDMSSMLNEYYSIELVNDGLDNDLKSVKLKSLPLLLKGYIPSLVKLPFFIYRLGKEVDWEDEQECLDGILREIALLYIPDMVPKVDTLDASLSEDEKAQFINRKEHISSLLEHVLFPCIKRRFLAPRHILKDVVEIANLPDLYKVFERC

SEQ ID NO: 499 - protein, 769 aa, Artificial sequence
  hybrid human-yeast MLH1 protein with single amino acid variation
MSLRIKALDASVVNKIAAGEIIISPVNALKEMMENSIDANATMIDILVKVGGIKVLQITDNGSGINKADLPILCERFTTSKLQSFEDLASISTYGFRGEALASISHVAHVTITTKTADGKCAYRASYSDGKMLESPKPVAGKDGTTILVEDLFFNIPSRLRALRSHNDEYSKILDVVGRYAIHSKDIGFSCKKFGDSNYSLSVKPSYTVQDRIRTVFNKSVASNLITFHISKVEDLNLESVDGKVCNLNFISKKSISLIFFINNRLVTCDLLRRALNSVYSNYLPKGFRPFIYLGIVIDPAAVDVNVHPTKREVRFLSQDEIIEKIANQLHAELSAIDTSRTFKASSISTNKPESLIPFNDTIESDRNRKSLRQAQVVENSYTTANSQLRKAKRQENKLVRIDASQAKITSFLSSSQQFNFEGSSTKRQLSEPKVTNVSHSQEAEKLTLNESEQPRDANTINDNDLKDQPKKKQKLGDYKVPSIADDEKNALPISKDGYIRVPKERVNVNLTSIKKLREKVDDSIHRELTDIFANLNYVGVVDEERRLAAIQHDLKLFLIDYGSVCYELFYQIGLTDFANFGKINLQSTNVSDDIVLYNLLSEFDELNDDASKEKIISKIWDMSSMLNEYYSIELVNDGLDNDLKSVKLKSLPLLLKGYIPSLVKLPFFIYRLGKEVDWEDEQECLDGILREIALLYIPDMVPKVDTLDASLSEDEKAQFINRKEHISSLLEHVLFPCIKRRFLAPRHILKDVVEIANLPDLYKVFERC

SEQ ID NO: 500 - protein, 769 aa, Artificial sequence
  hybrid human-yeast MLH1 protein with single amino acid variation
MSLRIKALDASVVNKIAAGEIIISPVNALKEMMENSIDANATMIDILVKEGRIKVLQITDNGSGINKADLPILCERFTTSKLQSFEDLASISTYGFRGEALASISHVAHVTITTKTADGKCAYRASYSDGKMLESPKPVAGKDGTTILVEDLFFNIPSRLRALRSHNDEYSKILDVVGRYAIHSKDIGFSCKKFGDSNYSLSVKPSYTVQDRIRTVFNKSVASNLITFHISKVEDLNLESVDGKVCNLNFISKKSISLIFFINNRLVTCDLLRRALNSVYSNYLPKGFRPFIYLGIVIDPAAVDVNVHPTKREVRFLSQDEIIEKIANQLHAELSAIDTSRTFKASSISTNKPESLIPFNDTIESDRNRKSLRQAQVVENSYTTANSQLRKAKRQENKLVRIDASQAKITSFLSSSQQFNFEGSSTKRQLSEPKVTNVSHSQEAEKLTLNESEQPRDANTINDNDLKDQPKKKQKLGDYKVPSIADDEKNALPISKDGYIRVPKERVNVNLTSIKKLREKVDDSIHRELTDIFANLNYVGVVDEERRLAAIQHDLKLFLIDYGSVCYELFYQIGLTDFANFGKINLQSTNVSDDIVLYNLLSEFDELNDDASKEKIISKIWDMSSMLNEYYSIELVNDGLDNDLKSVKLKSLPLLLKGYIPSLVKLPFFIYRLGKEVDWEDEQECLDGILREIALLYIPDMVPKVDTLDASLSEDEKAQFINRKEHISSLLEHVLFPCIKRRFLAPRHILKDVVEIANLPDLYKVFERC

SEQ ID NO: 501 - protein, 769 aa, Artificial sequence
  hybrid human-yeast MLH1 protein with single amino acid variation
MSLRIKALDASVVNKIAAGEIIISPVNALKEMMENSIDANATMIDILVKEGGIKVHQITDNGSGINKADLPILCERFTTSKLQSFEDLASISTYGFRGEALASISHVAHVTITTKTADGKCAYRASYSDGKMLESPKPVAGKDGTTILVEDLFFNIPSRLRALRSHNDEYSKILDVVGRYAIHSKDIGFSCKKFGDSNYSLSVKPSYTVQDRIRTVFNKSVASNLITFHISKVEDLNLESVDGKVCNLNFISKKSISLIFFINNRLVTCDLLRRALNSVYSNYLPKGFRPFIYLGIVIDPAAVDVNVHPTKREVRFLSQDEIIEKIANQLHAELSAIDTSRTFKASSISTNKPESLIPFNDTIESDRNRKSLRQAQVVENSYTTANSQLRKAKRQENKLVRIDASQAKITSFLSSSQQFNFEGSSTKRQLSEPKVTNVSHSQEAEKLTLNESEQPRDANTINDNDLKDQPKKKQKLGDYKVPSIADDEKNALPISKDGYIRVPKERVNVNLTSIKKLREKVDDSIHRELTDIFANLNYVGVVDEERRLAAIQHDLKLFLIDYGSVCYELFYQIGLTDFANFGKINLQSTNVSDDIVLYNLLSEFDELNDDASKEKIISKIWDMSSMLNEYYSIELVNDGLDNDLKSVKLKSLPLLLKGYIPSLVKLPFFIYRLGKEVDWEDEQECLDGILREIALLYIPDMVPKVDTLDASLSEDEKAQFINRKEHISSLLEHVLFPCIKRRFLAPRHILKDVVEIANLPDLYKVFERC

SEQ ID NO: 502 - protein, 769 aa, Artificial sequence
  hybrid human-yeast MLH1 protein with single amino acid variation
MSLRIKALDASVVNKIAAGEIIISPVNALKEMMENSIDANATMIDILVKEGGIKVLQKTDNGSGINKADLPILCERFTTSKLQSFEDLASISTYGFRGEALASISHVAHVTITTKTADGKCAYRASYSDGKMLESPKPVAGKDGTTILVEDLFFNIPSRLRALRSHNDEYSKILDVVGRYAIHSKDIGFSCKKFGDSNYSLSVKPSYTVQDRIRTVFNKSVASNLITFHISKVEDLNLESVDGKVCNLNFISKKSISLIFFINNRLVTCDLLRRALNSVYSNYLPKGFRPFIYLGIVIDPAAVDVNVHPTKREVRFLSQDEIIEKIANQLHAELSAIDTSRTFKASSISTNKPESLIPFNDTIESDRNRKSLRQAQVVENSYTTANSQLRKAKRQENKLVRIDASQAKITSFLSSSQQFNFEGSSTKRQLSEPKVTNVSHSQEAEKLTLNESEQPRDANTINDNDLKDQPKKKQKLGDYKVPSIADDEKNALPISKDGYIRVPKERVNVNLTSIKKLREKVDDSIHRELTDIFANLNYVGVVDEERRLAAIQHDLKLFLIDYGSVCYELFYQIGLTDFANFGKINLQSTNVSDDIVLYNLLSEFDELNDDASKEKIISKIWDMSSMLNEYYSIELVNDGLDNDLKSVKLKSLPLLLKGYIPSLVKLPFFIYRLGKEVDWEDEQECLDGILREIALLYIPDMVPKVDTLDASLSEDEKAQFINRKEHISSLLEHVLFPCIKRRFLAPRHILKDVVEIANLPDLYKVFERC

SEQ ID NO: 503 - protein, 769 aa, Artificial sequence
  hybrid human-yeast MLH1 protein with single amino acid variation
MSLRIKALDASVVNKIAAGEIIISPVNALKEMMENSIDANATMIDILVKEGGIKVLQITGNGSGINKADLPILCERFTTSKLQSFEDLASISTYGFRGEALASISHVAHVTITTKTADGKCAYRASYSDGKMLESPKPVAGKDGTTILVEDLFFNIPSRLRALRSHNDEYSKILDVVGRYAIHSKDIGFSCKKFGDSNYSLSVKPSYTVQDRIRTVFNKSVASNLITFHISKVEDLNLESVDGKVCNLNFISKKSISLIFFINNRLVTCDLLRRALNSVYSNYLPKGFRPFIYLGIVIDPAAVDVNVHPTKREVRFLSQDEIIEKIANQLHAELSAIDTSRTFKASSISTNKPESLIPFNDTIESDRNRKSLRQAQVVENSYTTANSQLRKAKRQENKLVRIDASQAKITSFLSSSQQFNFEGSSTKRQLSEPKVTNVSHSQEAEKLTLNESEQPRDANTINDNDLKDQPKKKQKLGDYKVPSIADDEKNALPISKDGYIRVPKERVNVNLTSIKKLREKVDDSIHRELTDIFANLNYVGVVDEERRLAAIQHDLKLFLIDYGSVCYELFYQIGLTDFANFGKINLQSTNVSDDIVLYNLLSEFDELNDDASKEKIISKIWDMSSMLNEYYSIELVNDGLDNDLKSVKLKSLPLLLKGYIPSLVKLPFFIYRLGKEVDWEDEQECLDGILREIALLYIPDMVPKVDTLDASLSEDEKAQFINRKEHISSLLEHVLFPCIKRRFLAPRHILKDVVEIANLPDLYKVFERC

SEQ ID NO: 504 - protein, 769 aa, Artificial sequence
  hybrid human-yeast MLH1 protein with single amino acid variation
MSLRIKALDASVVNKIAAGEIIISPVNALKEMMENSIDANATMIDILVKEGGIKVLQITDSGSGINKADLPILCERFTTSKLQSFEDLASISTYGFRGEALASISHVAHVTITTKTADGKCAYRASYSDGKMLESPKPVAGKDGTTILVEDLFFNIPSRLRALRSHNDEYSKILDVVGRYAIHSKDIGFSCKKFGDSNYSLSVKPSYTVQDRIRTVFNKSVASNLITFHISKVEDLNLESVDGKVCNLNFISKKSISLIFFINNRLVTCDLLRRALNSVYSNYLPKGFRPFIYLGIVIDPAAVDVNVHPTKREVRFLSQDEIIEKIANQLHAELSAIDTSRTFKASSISTNKPESLIPFNDTIESDRNRKSLRQAQVVENSYTTANSQLRKAKRQENKLVRIDASQAKITSFLSSSQQFNFEGSSTKRQLSEPKVTNVSHSQEAEKLTLNESEQPRDANTINDNDLKDQPKKKQKLGDYKVPSIADDEKNALPISKDGYIRVPKERVNVNLTSIKKLREKVDDSIHRELTDIFANLNYVGVVDEERRLAAIQHDLKLFLIDYGSVCYELFYQIGLTDFANFGKINLQSTNVSDDIVLYNLLSEFDELNDDASKEKIISKIWDMSSMLNEYYSIELVNDGLDNDLKSVKLKSLPLLLKGYIPSLVKLPFFIYRLGKEVDWEDEQECLDGILREIALLYIPDMVPKVDTLDASLSEDEKAQFINRKEHISSLLEHVLFPCIKRRFLAPRHILKDVVEIANLPDLYKVFERC

SEQ ID NO: 505 - protein, 769 aa, Artificial sequence
  hybrid human-yeast MLH1 protein with single amino acid variation
MSLRIKALDASVVNKIAAGEIIISPVNALKEMMENSIDANATMIDILVKEGGIKVLQITDNESGINKADLPILCERFTTSKLQSFEDLASISTYGFRGEALASISHVAHVTITTKTADGKCAYRASYSDGKMLESPKPVAGKDGTTILVEDLFFNIPSRLRALRSHNDEYSKILDVVGRYAIHSKDIGFSCKKFGDSNYSLSVKPSYTVQDRIRTVFNKSVASNLITFHISKVEDLNLESVDGKVCNLNFISKKSISLIFFINNRLVTCDLLRRALNSVYSNYLPKGFRPFIYLGIVIDPAAVDVNVHPTKREVRFLSQDEIIEKIANQLHAELSAIDTSRTFKASSISTNKPESLIPFNDTIESDRNRKSLRQAQVVENSYTTANSQLRKAKRQENKLVRIDASQAKITSFLSSSQQFNFEGSSTKRQLSEPKVTNVSHSQEAEKLTLNESEQPRDANTINDNDLKDQPKKKQKLGDYKVPSIADDEKNALPISKDGYIRVPKERVNVNLTSIKKLREKVDDSIHRELTDIFANLNYVGVVDEERRLAAIQHDLKLFLIDYGSVCYELFYQIGLTDFANFGKINLQSTNVSDDIVLYNLLSEFDELNDDASKEKIISKIWDMSSMLNEYYSIELVNDGLDNDLKSVKLKSLPLLLKGYIPSLVKLPFFIYRLGKEVDWEDEQECLDGILREIALLYIPDMVPKVDTLDASLSEDEKAQFINRKEHISSLLEHVLFPCIKRRFLAPRHILKDVVEIANLPDLYKVFERC

SEQ ID NO: 506 - protein, 769 aa, Artificial sequence
  hybrid human-yeast MLH1 protein with single amino acid variation
MSLRIKALDASVVNKIAAGEIIISPVNALKEMMENSIDANATMIDILVKEGGIKVLQITDNRSGINKADLPILCERFTTSKLQSFEDLASISTYGFRGEALASISHVAHVTITTKTADGKCAYRASYSDGKMLESPKPVAGKDGTTILVEDLFFNIPSRLRALRSHNDEYSKILDVVGRYAIHSKDIGFSCKKFGDSNYSLSVKPSYTVQDRIRTVFNKSVASNLITFHISKVEDLNLESVDGKVCNLNFISKKSISLIFFINNRLVTCDLLRRALNSVYSNYLPKGFRPFIYLGIVIDPAAVDVNVHPTKREVRFLSQDEIIEKIANQLHAELSAIDTSRTFKASSISTNKPESLIPFNDTIESDRNRKSLRQAQVVENSYTTANSQLRKAKRQENKLVRIDASQAKITSFLSSSQQFNFEGSSTKRQLSEPKVTNVSHSQEAEKLTLNESEQPRDANTINDNDLKDQPKKKQKLGDYKVPSIADDEKNALPISKDGYIRVPKERVNVNLTSIKKLREKVDDSIHRELTDIFANLNYVGVVDEERRLAAIQHDLKLFLIDYGSVCYELFYQIGLTDFANFGKINLQSTNVSDDIVLYNLLSEFDELNDDASKEKIISKIWDMSSMLNEYYSIELVNDGLDNDLKSVKLKSLPLLLKGYIPSLVKLPFFIYRLGKEVDWEDEQECLDGILREIALLYIPDMVPKVDTLDASLSEDEKAQFINRKEHISSLLEHVLFPCIKRRFLAPRHILKDVVEIANLPDLYKVFERC

SEQ ID NO: 507 - protein, 769 aa, Artificial sequence
  hybrid human-yeast MLH1 protein with single amino acid variation
MSLRIKALDASVVNKIAAGEIIISPVNALKEMMENSIDANATMIDILVKEGGIKVLQITDNGSGNNKADLPILCERFTTSKLQSFEDLASISTYGFRGEALASISHVAHVTITTKTADGKCAYRASYSDGKMLESPKPVAGKDGTTILVEDLFFNIPSRLRALRSHNDEYSKILDVVGRYAIHSKDIGFSCKKFGDSNYSLSVKPSYTVQDRIRTVFNKSVASNLITFHISKVEDLNLESVDGKVCNLNFISKKSISLIFFINNRLVTCDLLRRALNSVYSNYLPKGFRPFIYLGIVIDPAAVDVNVHPTKREVRFLSQDEIIEKIANQLHAELSAIDTSRTFKASSISTNKPESLIPFNDTIESDRNRKSLRQAQVVENSYTTANSQLRKAKRQENKLVRIDASQAKITSFLSSSQQFNFEGSSTKRQLSEPKVTNVSHSQEAEKLTLNESEQPRDANTINDNDLKDQPKKKQKLGDYKVPSIADDEKNALPISKDGYIRVPKERVNVNLTSIKKLREKVDDSIHRELTDIFANLNYVGVVDEERRLAAIQHDLKLFLIDYGSVCYELFYQIGLTDFANFGKINLQSTNVSDDIVLYNLLSEFDELNDDASKEKIISKIWDMSSMLNEYYSIELVNDGLDNDLKSVKLKSLPLLLKGYIPSLVKLPFFIYRLGKEVDWEDEQECLDGILREIALLYIPDMVPKVDTLDASLSEDEKAQFINRKEHISSLLEHVLFPCIKRRFLAPRHILKDVVEIANLPDLYKVFERC

SEQ ID NO: 508 - protein, 769 aa, Artificial sequence
  hybrid human-yeast MLH1 protein with single amino acid variation
MSLRIKALDASVVNKIAAGEIIISPVNALKEMMENSIDANATMIDILVKEGGIKVLQITDNGSGINKADLLILCERFTTSKLQSFEDLASISTYGFRGEALASISHVAHVTITTKTADGKCAYRASYSDGKMLESPKPVAGKDGTTILVEDLFFNIPSRLRALRSHNDEYSKILDVVGRYAIHSKDIGFSCKKFGDSNYSLSVKPSYTVQDRIRTVFNKSVASNLITFHISKVEDLNLESVDGKVCNLNFISKKSISLIFFINNRLVTCDLLRRALNSVYSNYLPKGFRPFIYLGIVIDPAAVDVNVHPTKREVRFLSQDEIIEKIANQLHAELSAIDTSRTFKASSISTNKPESLIPFNDTIESDRNRKSLRQAQVVENSYTTANSQLRKAKRQENKLVRIDASQAKITSFLSSSQQFNFEGSSTKRQLSEPKVTNVSHSQEAEKLTLNESEQPRDANTINDNDLKDQPKKKQKLGDYKVPSIADDEKNALPISKDGYIRVPKERVNVNLTSIKKLREKVDDSIHRELTDIFANLNYVGVVDEERRLAAIQHDLKLFLIDYGSVCYELFYQIGLTDFANFGKINLQSTNVSDDIVLYNLLSEFDELNDDASKEKIISKIWDMSSMLNEYYSIELVNDGLDNDLKSVKLKSLPLLLKGYIPSLVKLPFFIYRLGKEVDWEDEQECLDGILREIALLYIPDMVPKVDTLDASLSEDEKAQFINRKEHISSLLEHVLFPCIKRRFLAPRHILKDVVEIANLPDLYKVFERC

SEQ ID NO: 509 - protein, 769 aa, Artificial sequence
  hybrid human-yeast MLH1 protein with single amino acid variation
MSLRIKALDASVVNKIAAGEIIISPVNALKEMMENSIDANATMIDILVKEGGIKVLQITDNGSGINKADLPILRERFTTSKLQSFEDLASISTYGFRGEALASISHVAHVTITTKTADGKCAYRASYSDGKMLESPKPVAGKDGTTILVEDLFFNIPSRLRALRSHNDEYSKILDVVGRYAIHSKDIGFSCKKFGDSNYSLSVKPSYTVQDRIRTVFNKSVASNLITFHISKVEDLNLESVDGKVCNLNFISKKSISLIFFINNRLVTCDLLRRALNSVYSNYLPKGFRPFIYLGIVIDPAAVDVNVHPTKREVRFLSQDEIIEKIANQLHAELSAIDTSRTFKASSISTNKPESLIPFNDTIESDRNRKSLRQAQVVENSYTTANSQLRKAKRQENKLVRIDASQAKITSFLSSSQQFNFEGSSTKRQLSEPKVTNVSHSQEAEKLTLNESEQPRDANTINDNDLKDQPKKKQKLGDYKVPSIADDEKNALPISKDGYIRVPKERVNVNLTSIKKLREKVDDSIHRELTDIFANLNYVGVVDEERRLAAIQHDLKLFLIDYGSVCYELFYQIGLTDFANFGKINLQSTNVSDDIVLYNLLSEFDELNDDASKEKIISKIWDMSSMLNEYYSIELVNDGLDNDLKSVKLKSLPLLLKGYIPSLVKLPFFIYRLGKEVDWEDEQECLDGILREIALLYIPDMVPKVDTLDASLSEDEKAQFINRKEHISSLLEHVLFPCIKRRFLAPRHILKDVVEIANLPDLYKVFERC

SEQ ID NO: 510 - protein, 769 aa, Artificial sequence
  hybrid human-yeast MLH1 protein with single amino acid variation
MSLRIKALDASVVNKIAAGEIIISPVNALKEMMENSIDANATMIDILVKEGGIKVLQITDNGSGINKADLPILCVRFTTSKLQSFEDLASISTYGFRGEALASISHVAHVTITTKTADGKCAYRASYSDGKMLESPKPVAGKDGTTILVEDLFFNIPSRLRALRSHNDEYSKILDVVGRYAIHSKDIGFSCKKFGDSNYSLSVKPSYTVQDRIRTVFNKSVASNLITFHISKVEDLNLESVDGKVCNLNFISKKSISLIFFINNRLVTCDLLRRALNSVYSNYLPKGFRPFIYLGIVIDPAAVDVNVHPTKREVRFLSQDEIIEKIANQLHAELSAIDTSRTFKASSISTNKPESLIPFNDTIESDRNRKSLRQAQVVENSYTTANSQLRKAKRQENKLVRIDASQAKITSFLSSSQQFNFEGSSTKRQLSEPKVTNVSHSQEAEKLTLNESEQPRDANTINDNDLKDQPKKKQKLGDYKVPSIADDEKNALPISKDGYIRVPKERVNVNLTSIKKLREKVDDSIHRELTDIFANLNYVGVVDEERRLAAIQHDLKLFLIDYGSVCYELFYQIGLTDFANFGKINLQSTNVSDDIVLYNLLSEFDELNDDASKEKIISKIWDMSSMLNEYYSIELVNDGLDNDLKSVKLKSLPLLLKGYIPSLVKLPFFIYRLGKEVDWEDEQECLDGILREIALLYIPDMVPKVDTLDASLSEDEKAQFINRKEHISSLLEHVLFPCIKRRFLAPRHILKDVVEIANLPDLYKVFERC

SEQ ID NO: 511 - protein, 769 aa, Artificial sequence
  hybrid human-yeast MLH1 protein with single amino acid variation
MSLRIKALDASVVNKIAAGEIIISPVNALKEMMENSIDANATMIDILVKEGGIKVLQITDNGSGINKADLPILCERLTTSKLQSFEDLASISTYGFRGEALASISHVAHVTITTKTADGKCAYRASYSDGKMLESPKPVAGKDGTTILVEDLFFNIPSRLRALRSHNDEYSKILDVVGRYAIHSKDIGFSCKKFGDSNYSLSVKPSYTVQDRIRTVFNKSVASNLITFHISKVEDLNLESVDGKVCNLNFISKKSISLIFFINNRLVTCDLLRRALNSVYSNYLPKGFRPFIYLGIVIDPAAVDVNVHPTKREVRFLSQDEIIEKIANQLHAELSAIDTSRTFKASSISTNKPESLIPFNDTIESDRNRKSLRQAQVVENSYTTANSQLRKAKRQENKLVRIDASQAKITSFLSSSQQFNFEGSSTKRQLSEPKVTNVSHSQEAEKLTLNESEQPRDANTINDNDLKDQPKKKQKLGDYKVPSIADDEKNALPISKDGYIRVPKERVNVNLTSIKKLREKVDDSIHRELTDIFANLNYVGVVDEERRLAAIQHDLKLFLIDYGSVCYELFYQIGLTDFANFGKINLQSTNVSDDIVLYNLLSEFDELNDDASKEKIISKIWDMSSMLNEYYSIELVNDGLDNDLKSVKLKSLPLLLKGYIPSLVKLPFFIYRLGKEVDWEDEQECLDGILREIALLYIPDMVPKVDTLDASLSEDEKAQFINRKEHISSLLEHVLFPCIKRRFLAPRHILKDVVEIANLPDLYKVFERC

SEQ ID NO: 512 - protein, 769 aa, Artificial sequence
  hybrid human-yeast MLH1 protein with single amino acid variation
MSLRIKALDASVVNKIAAGEIIISPVNALKEMMENSIDANATMIDILVKEGGIKVLQITDNGSGINKADLPILCERFTTSKLQSFVDLASISTYGFRGEALASISHVAHVTITTKTADGKCAYRASYSDGKMLESPKPVAGKDGTTILVEDLFFNIPSRLRALRSHNDEYSKILDVVGRYAIHSKDIGFSCKKFGDSNYSLSVKPSYTVQDRIRTVFNKSVASNLITFHISKVEDLNLESVDGKVCNLNFISKKSISLIFFINNRLVTCDLLRRALNSVYSNYLPKGFRPFIYLGIVIDPAAVDVNVHPTKREVRFLSQDEIIEKIANQLHAELSAIDTSRTFKASSISTNKPESLIPFNDTIESDRNRKSLRQAQVVENSYTTANSQLRKAKRQENKLVRIDASQAKITSFLSSSQQFNFEGSSTKRQLSEPKVTNVSHSQEAEKLTLNESEQPRDANTINDNDLKDQPKKKQKLGDYKVPSIADDEKNALPISKDGYIRVPKERVNVNLTSIKKLREKVDDSIHRELTDIFANLNYVGVVDEERRLAAIQHDLKLFLIDYGSVCYELFYQIGLTDFANFGKINLQSTNVSDDIVLYNLLSEFDELNDDASKEKIISKIWDMSSMLNEYYSIELVNDGLDNDLKSVKLKSLPLLLKGYIPSLVKLPFFIYRLGKEVDWEDEQECLDGILREIALLYIPDMVPKVDTLDASLSEDEKAQFINRKEHISSLLEHVLFPCIKRRFLAPRHILKDVVEIANLPDLYKVFERC

SEQ ID NO: 513 - protein, 769 aa, Artificial sequence
  hybrid human-yeast MLH1 protein with single amino acid variation
MSLRIKALDASVVNKIAAGEIIISPVNALKEMMENSIDANATMIDILVKEGGIKVLQITDNGSGINKADLPILCERFTTSKLQSFEDLASISTYGIRGEALASISHVAHVTITTKTADGKCAYRASYSDGKMLESPKPVAGKDGTTILVEDLFFNIPSRLRALRSHNDEYSKILDVVGRYAIHSKDIGFSCKKFGDSNYSLSVKPSYTVQDRIRTVFNKSVASNLITFHISKVEDLNLESVDGKVCNLNFISKKSISLIFFINNRLVTCDLLRRALNSVYSNYLPKGFRPFIYLGIVIDPAAVDVNVHPTKREVRFLSQDEIIEKIANQLHAELSAIDTSRTFKASSISTNKPESLIPFNDTIESDRNRKSLRQAQVVENSYTTANSQLRKAKRQENKLVRIDASQAKITSFLSSSQQFNFEGSSTKRQLSEPKVTNVSHSQEAEKLTLNESEQPRDANTINDNDLKDQPKKKQKLGDYKVPSIADDEKNALPISKDGYIRVPKERVNVNLTSIKKLREKVDDSIHRELTDIFANLNYVGVVDEERRLAAIQHDLKLFLIDYGSVCYELFYQIGLTDFANFGKINLQSTNVSDDIVLYNLLSEFDELNDDASKEKIISKIWDMSSMLNEYYSIELVNDGLDNDLKSVKLKSLPLLLKGYIPSLVKLPFFIYRLGKEVDWEDEQECLDGILREIALLYIPDMVPKVDTLDASLSEDEKAQFINRKEHISSLLEHVLFPCIKRRFLAPRHILKDVVEIANLPDLYKVFERC

SEQ ID NO: 514 - protein, 769 aa, Artificial sequence
  hybrid human-yeast MLH1 protein with single amino acid variation
MSLRIKALDASVVNKIAAGEIIISPVNALKEMMENSIDANATMIDILVKEGGIKVLQITDNGSGINKADLPILCERFTTSKLQSFEDLASISTYGLRGEALASISHVAHVTITTKTADGKCAYRASYSDGKMLESPKPVAGKDGTTILVEDLFFNIPSRLRALRSHNDEYSKILDVVGRYAIHSKDIGFSCKKFGDSNYSLSVKPSYTVQDRIRTVFNKSVASNLITFHISKVEDLNLESVDGKVCNLNFISKKSISLIFFINNRLVTCDLLRRALNSVYSNYLPKGFRPFIYLGIVIDPAAVDVNVHPTKREVRFLSQDEIIEKIANQLHAELSAIDTSRTFKASSISTNKPESLIPFNDTIESDRNRKSLRQAQVVENSYTTANSQLRKAKRQENKLVRIDASQAKITSFLSSSQQFNFEGSSTKRQLSEPKVTNVSHSQEAEKLTLNESEQPRDANTINDNDLKDQPKKKQKLGDYKVPSIADDEKNALPISKDGYIRVPKERVNVNLTSIKKLREKVDDSIHRELTDIFANLNYVGVVDEERRLAAIQHDLKLFLIDYGSVCYELFYQIGLTDFANFGKINLQSTNVSDDIVLYNLLSEFDELNDDASKEKIISKIWDMSSMLNEYYSIELVNDGLDNDLKSVKLKSLPLLLKGYIPSLVKLPFFIYRLGKEVDWEDEQECLDGILREIALLYIPDMVPKVDTLDASLSEDEKAQFINRKEHISSLLEHVLFPCIKRRFLAPRHILKDVVEIANLPDLYKVFERC

SEQ ID NO: 515 - protein, 769 aa, Artificial sequence
  hybrid human-yeast MLH1 protein with single amino acid variation
MSLRIKALDASVVNKIAAGEIIISPVNALKEMMENSIDANATMIDILVKEGGIKVLQITDNGSGINKADLPILCERFTTSKLQSFEDLASISTYGFQGEALASISHVAHVTITTKTADGKCAYRASYSDGKMLESPKPVAGKDGTTILVEDLFFNIPSRLRALRSHNDEYSKILDVVGRYAIHSKDIGFSCKKFGDSNYSLSVKPSYTVQDRIRTVFNKSVASNLITFHISKVEDLNLESVDGKVCNLNFISKKSISLIFFINNRLVTCDLLRRALNSVYSNYLPKGFRPFIYLGIVIDPAAVDVNVHPTKREVRFLSQDEIIEKIANQLHAELSAIDTSRTFKASSISTNKPESLIPFNDTIESDRNRKSLRQAQVVENSYTTANSQLRKAKRQENKLVRIDASQAKITSFLSSSQQFNFEGSSTKRQLSEPKVTNVSHSQEAEKLTLNESEQPRDANTINDNDLKDQPKKKQKLGDYKVPSIADDEKNALPISKDGYIRVPKERVNVNLTSIKKLREKVDDSIHRELTDIFANLNYVGVVDEERRLAAIQHDLKLFLIDYGSVCYELFYQIGLTDFANFGKINLQSTNVSDDIVLYNLLSEFDELNDDASKEKIISKIWDMSSMLNEYYSIELVNDGLDNDLKSVKLKSLPLLLKGYIPSLVKLPFFIYRLGKEVDWEDEQECLDGILREIALLYIPDMVPKVDTLDASLSEDEKAQFINRKEHISSLLEHVLFPCIKRRFLAPRHILKDVVEIANLPDLYKVFERC

SEQ ID NO: 516 - protein, 769 aa, Artificial sequence
  hybrid human-yeast MLH1 protein with single amino acid variation
MSLRIKALDASVVNKIAAGEIIISPVNALKEMMENSIDANATMIDILVKEGGIKVLQITDNGSGINKADLPILCERFTTSKLQSFEDLASISTYGFRDEALASISHVAHVTITTKTADGKCAYRASYSDGKMLESPKPVAGKDGTTILVEDLFFNIPSRLRALRSHNDEYSKILDVVGRYAIHSKDIGFSCKKFGDSNYSLSVKPSYTVQDRIRTVFNKSVASNLITFHISKVEDLNLESVDGKVCNLNFISKKSISLIFFINNRLVTCDLLRRALNSVYSNYLPKGFRPFIYLGIVIDPAAVDVNVHPTKREVRFLSQDEIIEKIANQLHAELSAIDTSRTFKASSISTNKPESLIPFNDTIESDRNRKSLRQAQVVENSYTTANSQLRKAKRQENKLVRIDASQAKITSFLSSSQQFNFEGSSTKRQLSEPKVTNVSHSQEAEKLTLNESEQPRDANTINDNDLKDQPKKKQKLGDYKVPSIADDEKNALPISKDGYIRVPKERVNVNLTSIKKLREKVDDSIHRELTDIFANLNYVGVVDEERRLAAIQHDLKLFLIDYGSVCYELFYQIGLTDFANFGKINLQSTNVSDDIVLYNLLSEFDELNDDASKEKIISKIWDMSSMLNEYYSIELVNDGLDNDLKSVKLKSLPLLLKGYIPSLVKLPFFIYRLGKEVDWEDEQECLDGILREIALLYIPDMVPKVDTLDASLSEDEKAQFINRKEHISSLLEHVLFPCIKRRFLAPRHILKDVVEIANLPDLYKVFERC

SEQ ID NO: 517 - protein, 769 aa, Artificial sequence
  hybrid human-yeast MLH1 protein with single amino acid variation
MSLRIKALDASVVNKIAAGEIIISPVNALKEMMENSIDANATMIDILVKEGGIKVLQITDNGSGINKADLPILCERFTTSKLQSFEDLASISTYGFRGEVLASISHVAHVTITTKTADGKCAYRASYSDGKMLESPKPVAGKDGTTILVEDLFFNIPSRLRALRSHNDEYSKILDVVGRYAIHSKDIGFSCKKFGDSNYSLSVKPSYTVQDRIRTVFNKSVASNLITFHISKVEDLNLESVDGKVCNLNFISKKSISLIFFINNRLVTCDLLRRALNSVYSNYLPKGFRPFIYLGIVIDPAAVDVNVHPTKREVRFLSQDEIIEKIANQLHAELSAIDTSRTFKASSISTNKPESLIPFNDTIESDRNRKSLRQAQVVENSYTTANSQLRKAKRQENKLVRIDASQAKITSFLSSSQQFNFEGSSTKRQLSEPKVTNVSHSQEAEKLTLNESEQPRDANTINDNDLKDQPKKKQKLGDYKVPSIADDEKNALPISKDGYIRVPKERVNVNLTSIKKLREKVDDSIHRELTDIFANLNYVGVVDEERRLAAIQHDLKLFLIDYGSVCYELFYQIGLTDFANFGKINLQSTNVSDDIVLYNLLSEFDELNDDASKEKIISKIWDMSSMLNEYYSIELVNDGLDNDLKSVKLKSLPLLLKGYIPSLVKLPFFIYRLGKEVDWEDEQECLDGILREIALLYIPDMVPKVDTLDASLSEDEKAQFINRKEHISSLLEHVLFPCIKRRFLAPRHILKDVVEIANLPDLYKVFERC

SEQ ID NO: 518 - protein, 769 aa, Artificial sequence
  hybrid human-yeast MLH1 protein with single amino acid variation
MSLRIKALDASVVNKIAAGEIIISPVNALKEMMENSIDANATMIDILVKEGGIKVLQITDNGSGINKADLPILCERFTTSKLQSFEDLASISTYGFRGETLASISHVAHVTITTKTADGKCAYRASYSDGKMLESPKPVAGKDGTTILVEDLFFNIPSRLRALRSHNDEYSKILDVVGRYAIHSKDIGFSCKKFGDSNYSLSVKPSYTVQDRIRTVFNKSVASNLITFHISKVEDLNLESVDGKVCNLNFISKKSISLIFFINNRLVTCDLLRRALNSVYSNYLPKGFRPFIYLGIVIDPAAVDVNVHPTKREVRFLSQDEIIEKIANQLHAELSAIDTSRTFKASSISTNKPESLIPFNDTIESDRNRKSLRQAQVVENSYTTANSQLRKAKRQENKLVRIDASQAKITSFLSSSQQFNFEGSSTKRQLSEPKVTNVSHSQEAEKLTLNESEQPRDANTINDNDLKDQPKKKQKLGDYKVPSIADDEKNALPISKDGYIRVPKERVNVNLTSIKKLREKVDDSIHRELTDIFANLNYVGVVDEERRLAAIQHDLKLFLIDYGSVCYELFYQIGLTDFANFGKINLQSTNVSDDIVLYNLLSEFDELNDDASKEKIISKIWDMSSMLNEYYSIELVNDGLDNDLKSVKLKSLPLLLKGYIPSLVKLPFFIYRLGKEVDWEDEQECLDGILREIALLYIPDMVPKVDTLDASLSEDEKAQFINRKEHISSLLEHVLFPCIKRRFLAPRHILKDVVEIANLPDLYKVFERC

SEQ ID NO: 519 - protein, 769 aa, Artificial sequence
  hybrid human-yeast MLH1 protein with single amino acid variation
MSLRIKALDASVVNKIAAGEIIISPVNALKEMMENSIDANATMIDILVKEGGIKVLQITDNGSGINKADLPILCERFTTSKLQSFEDLASISTYGFRGEPLASISHVAHVTITTKTADGKCAYRASYSDGKMLESPKPVAGKDGTTILVEDLFFNIPSRLRALRSHNDEYSKILDVVGRYAIHSKDIGFSCKKFGDSNYSLSVKPSYTVQDRIRTVFNKSVASNLITFHISKVEDLNLESVDGKVCNLNFISKKSISLIFFINNRLVTCDLLRRALNSVYSNYLPKGFRPFIYLGIVIDPAAVDVNVHPTKREVRFLSQDEIIEKIANQLHAELSAIDTSRTFKASSISTNKPESLIPFNDTIESDRNRKSLRQAQVVENSYTTANSQLRKAKRQENKLVRIDASQAKITSFLSSSQQFNFEGSSTKRQLSEPKVTNVSHSQEAEKLTLNESEQPRDANTINDNDLKDQPKKKQKLGDYKVPSIADDEKNALPISKDGYIRVPKERVNVNLTSIKKLREKVDDSIHRELTDIFANLNYVGVVDEERRLAAIQHDLKLFLIDYGSVCYELFYQIGLTDFANFGKINLQSTNVSDDIVLYNLLSEFDELNDDASKEKIISKIWDMSSMLNEYYSIELVNDGLDNDLKSVKLKSLPLLLKGYIPSLVKLPFFIYRLGKEVDWEDEQECLDGILREIALLYIPDMVPKVDTLDASLSEDEKAQFINRKEHISSLLEHVLFPCIKRRFLAPRHILKDVVEIANLPDLYKVFERC

SEQ ID NO: 520 - protein, 769 aa, Artificial sequence
  hybrid human-yeast MLH1 protein with single amino acid variation
MSLRIKALDASVVNKIAAGEIIISPVNALKEMMENSIDANATMIDILVKEGGIKVLQITDNGSGINKADLPILCERFTTSKLQSFEDLASISTYGFRGEALASISHVTHVTITTKTADGKCAYRASYSDGKMLESPKPVAGKDGTTILVEDLFFNIPSRLRALRSHNDEYSKILDVVGRYAIHSKDIGFSCKKFGDSNYSLSVKPSYTVQDRIRTVFNKSVASNLITFHISKVEDLNLESVDGKVCNLNFISKKSISLIFFINNRLVTCDLLRRALNSVYSNYLPKGFRPFIYLGIVIDPAAVDVNVHPTKREVRFLSQDEIIEKIANQLHAELSAIDTSRTFKASSISTNKPESLIPFNDTIESDRNRKSLRQAQVVENSYTTANSQLRKAKRQENKLVRIDASQAKITSFLSSSQQFNFEGSSTKRQLSEPKVTNVSHSQEAEKLTLNESEQPRDANTINDNDLKDQPKKKQKLGDYKVPSIADDEKNALPISKDGYIRVPKERVNVNLTSIKKLREKVDDSIHRELTDIFANLNYVGVVDEERRLAAIQHDLKLFLIDYGSVCYELFYQIGLTDFANFGKINLQSTNVSDDIVLYNLLSEFDELNDDASKEKIISKIWDMSSMLNEYYSIELVNDGLDNDLKSVKLKSLPLLLKGYIPSLVKLPFFIYRLGKEVDWEDEQECLDGILREIALLYIPDMVPKVDTLDASLSEDEKAQFINRKEHISSLLEHVLFPCIKRRFLAPRHILKDVVEIANLPDLYKVFERC

SEQ ID NO: 521 - protein, 769 aa, Artificial sequence
  hybrid human-yeast MLH1 protein with single amino acid variation
MSLRIKALDASVVNKIAAGEIIISPVNALKEMMENSIDANATMIDILVKEGGIKVLQITDNGSGINKADLPILCERFTTSKLQSFEDLASISTYGFRGEALASISHVAHVIITTKTADGKCAYRASYSDGKMLESPKPVAGKDGTTILVEDLFFNIPSRLRALRSHNDEYSKILDVVGRYAIHSKDIGFSCKKFGDSNYSLSVKPSYTVQDRIRTVFNKSVASNLITFHISKVEDLNLESVDGKVCNLNFISKKSISLIFFINNRLVTCDLLRRALNSVYSNYLPKGFRPFIYLGIVIDPAAVDVNVHPTKREVRFLSQDEIIEKIANQLHAELSAIDTSRTFKASSISTNKPESLIPFNDTIESDRNRKSLRQAQVVENSYTTANSQLRKAKRQENKLVRIDASQAKITSFLSSSQQFNFEGSSTKRQLSEPKVTNVSHSQEAEKLTLNESEQPRDANTINDNDLKDQPKKKQKLGDYKVPSIADDEKNALPISKDGYIRVPKERVNVNLTSIKKLREKVDDSIHRELTDIFANLNYVGVVDEERRLAAIQHDLKLFLIDYGSVCYELFYQIGLTDFANFGKINLQSTNVSDDIVLYNLLSEFDELNDDASKEKIISKIWDMSSMLNEYYSIELVNDGLDNDLKSVKLKSLPLLLKGYIPSLVKLPFFIYRLGKEVDWEDEQECLDGILREIALLYIPDMVPKVDTLDASLSEDEKAQFINRKEHISSLLEHVLFPCIKRRFLAPRHILKDVVEIANLPDLYKVFERC

SEQ ID NO: 522 - protein, 769 aa, Artificial sequence
  hybrid human-yeast MLH1 protein with single amino acid variation
MSLRIKALDASVVNKIAAGEIIISPVNALKEMMENSIDANATMIDILVKEGGIKVLQITDNGSGINKADLPILCERFTTSKLQSFEDLASISTYGFRGEALASISHVAHVTSTTKTADGKCAYRASYSDGKMLESPKPVAGKDGTTILVEDLFFNIPSRLRALRSHNDEYSKILDVVGRYAIHSKDIGFSCKKFGDSNYSLSVKPSYTVQDRIRTVFNKSVASNLITFHISKVEDLNLESVDGKVCNLNFISKKSISLIFFINNRLVTCDLLRRALNSVYSNYLPKGFRPFIYLGIVIDPAAVDVNVHPTKREVRFLSQDEIIEKIANQLHAELSAIDTSRTFKASSISTNKPESLIPFNDTIESDRNRKSLRQAQVVENSYTTANSQLRKAKRQENKLVRIDASQAKITSFLSSSQQFNFEGSSTKRQLSEPKVTNVSHSQEAEKLTLNESEQPRDANTINDNDLKDQPKKKQKLGDYKVPSIADDEKNALPISKDGYIRVPKERVNVNLTSIKKLREKVDDSIHRELTDIFANLNYVGVVDEERRLAAIQHDLKLFLIDYGSVCYELFYQIGLTDFANFGKINLQSTNVSDDIVLYNLLSEFDELNDDASKEKIISKIWDMSSMLNEYYSIELVNDGLDNDLKSVKLKSLPLLLKGYIPSLVKLPFFIYRLGKEVDWEDEQECLDGILREIALLYIPDMVPKVDTLDASLSEDEKAQFINRKEHISSLLEHVLFPCIKRRFLAPRHILKDVVEIANLPDLYKVFERC

SEQ ID NO: 523 - protein, 769 aa, Artificial sequence
  hybrid human-yeast MLH1 protein with single amino acid variation
MSLRIKALDASVVNKIAAGEIIISPVNALKEMMENSIDANATMIDILVKEGGIKVLQITDNGSGINKADLPILCERFTTSKLQSFEDLASISTYGFRGEALASISHVAHVTNTTKTADGKCAYRASYSDGKMLESPKPVAGKDGTTILVEDLFFNIPSRLRALRSHNDEYSKILDVVGRYAIHSKDIGFSCKKFGDSNYSLSVKPSYTVQDRIRTVFNKSVASNLITFHISKVEDLNLESVDGKVCNLNFISKKSISLIFFINNRLVTCDLLRRALNSVYSNYLPKGFRPFIYLGIVIDPAAVDVNVHPTKREVRFLSQDEIIEKIANQLHAELSAIDTSRTFKASSISTNKPESLIPFNDTIESDRNRKSLRQAQVVENSYTTANSQLRKAKRQENKLVRIDASQAKITSFLSSSQQFNFEGSSTKRQLSEPKVTNVSHSQEAEKLTLNESEQPRDANTINDNDLKDQPKKKQKLGDYKVPSIADDEKNALPISKDGYIRVPKERVNVNLTSIKKLREKVDDSIHRELTDIFANLNYVGVVDEERRLAAIQHDLKLFLIDYGSVCYELFYQIGLTDFANFGKINLQSTNVSDDIVLYNLLSEFDELNDDASKEKIISKIWDMSSMLNEYYSIELVNDGLDNDLKSVKLKSLPLLLKGYIPSLVKLPFFIYRLGKEVDWEDEQECLDGILREIALLYIPDMVPKVDTLDASLSEDEKAQFINRKEHISSLLEHVLFPCIKRRFLAPRHILKDVVEIANLPDLYKVFERC

SEQ ID NO: 524 - protein, 769 aa, Artificial sequence
  hybrid human-yeast MLH1 protein with single amino acid variation
MSLRIKALDASVVNKIAAGEIIISPVNALKEMMENSIDANATMIDILVKEGGIKVLQITDNGSGINKADLPILCERFTTSKLQSFEDLASISTYGFRGEALASISHVAHVTFTTKTADGKCAYRASYSDGKMLESPKPVAGKDGTTILVEDLFFNIPSRLRALRSHNDEYSKILDVVGRYAIHSKDIGFSCKKFGDSNYSLSVKPSYTVQDRIRTVFNKSVASNLITFHISKVEDLNLESVDGKVCNLNFISKKSISLIFFINNRLVTCDLLRRALNSVYSNYLPKGFRPFIYLGIVIDPAAVDVNVHPTKREVRFLSQDEIIEKIANQLHAELSAIDTSRTFKASSISTNKPESLIPFNDTIESDRNRKSLRQAQVVENSYTTANSQLRKAKRQENKLVRIDASQAKITSFLSSSQQFNFEGSSTKRQLSEPKVTNVSHSQEAEKLTLNESEQPRDANTINDNDLKDQPKKKQKLGDYKVPSIADDEKNALPISKDGYIRVPKERVNVNLTSIKKLREKVDDSIHRELTDIFANLNYVGVVDEERRLAAIQHDLKLFLIDYGSVCYELFYQIGLTDFANFGKINLQSTNVSDDIVLYNLLSEFDELNDDASKEKIISKIWDMSSMLNEYYSIELVNDGLDNDLKSVKLKSLPLLLKGYIPSLVKLPFFIYRLGKEVDWEDEQECLDGILREIALLYIPDMVPKVDTLDASLSEDEKAQFINRKEHISSLLEHVLFPCIKRRFLAPRHILKDVVEIANLPDLYKVFERC

SEQ ID NO: 525 - protein, 769 aa, Artificial sequence
  hybrid human-yeast MLH1 protein with single amino acid variation
MSLRIKALDASVVNKIAAGEIIISPVNALKEMMENSIDANATMIDILVKEGGIKVLQITDNGSGINKADLPILCERFTTSKLQSFEDLASISTYGFRGEALASISHVAHVTISTKTADGKCAYRASYSDGKMLESPKPVAGKDGTTILVEDLFFNIPSRLRALRSHNDEYSKILDVVGRYAIHSKDIGFSCKKFGDSNYSLSVKPSYTVQDRIRTVFNKSVASNLITFHISKVEDLNLESVDGKVCNLNFISKKSISLIFFINNRLVTCDLLRRALNSVYSNYLPKGFRPFIYLGIVIDPAAVDVNVHPTKREVRFLSQDEIIEKIANQLHAELSAIDTSRTFKASSISTNKPESLIPFNDTIESDRNRKSLRQAQVVENSYTTANSQLRKAKRQENKLVRIDASQAKITSFLSSSQQFNFEGSSTKRQLSEPKVTNVSHSQEAEKLTLNESEQPRDANTINDNDLKDQPKKKQKLGDYKVPSIADDEKNALPISKDGYIRVPKERVNVNLTSIKKLREKVDDSIHRELTDIFANLNYVGVVDEERRLAAIQHDLKLFLIDYGSVCYELFYQIGLTDFANFGKINLQSTNVSDDIVLYNLLSEFDELNDDASKEKIISKIWDMSSMLNEYYSIELVNDGLDNDLKSVKLKSLPLLLKGYIPSLVKLPFFIYRLGKEVDWEDEQECLDGILREIALLYIPDMVPKVDTLDASLSEDEKAQFINRKEHISSLLEHVLFPCIKRRFLAPRHILKDVVEIANLPDLYKVFERC

SEQ ID NO: 526 - protein, 769 aa, Artificial sequence
  hybrid human-yeast MLH1 protein with single amino acid variation
MSLRIKALDASVVNKIAAGEIIISPVNALKEMMENSIDANATMIDILVKEGGIKVLQITDNGSGINKADLPILCERFTTSKLQSFEDLASISTYGFRGEALASISHVAHVTITTNTADGKCAYRASYSDGKMLESPKPVAGKDGTTILVEDLFFNIPSRLRALRSHNDEYSKILDVVGRYAIHSKDIGFSCKKFGDSNYSLSVKPSYTVQDRIRTVFNKSVASNLITFHISKVEDLNLESVDGKVCNLNFISKKSISLIFFINNRLVTCDLLRRALNSVYSNYLPKGFRPFIYLGIVIDPAAVDVNVHPTKREVRFLSQDEIIEKIANQLHAELSAIDTSRTFKASSISTNKPESLIPFNDTIESDRNRKSLRQAQVVENSYTTANSQLRKAKRQENKLVRIDASQAKITSFLSSSQQFNFEGSSTKRQLSEPKVTNVSHSQEAEKLTLNESEQPRDANTINDNDLKDQPKKKQKLGDYKVPSIADDEKNALPISKDGYIRVPKERVNVNLTSIKKLREKVDDSIHRELTDIFANLNYVGVVDEERRLAAIQHDLKLFLIDYGSVCYELFYQIGLTDFANFGKINLQSTNVSDDIVLYNLLSEFDELNDDASKEKIISKIWDMSSMLNEYYSIELVNDGLDNDLKSVKLKSLPLLLKGYIPSLVKLPFFIYRLGKEVDWEDEQECLDGILREIALLYIPDMVPKVDTLDASLSEDEKAQFINRKEHISSLLEHVLFPCIKRRFLAPRHILKDVVEIANLPDLYKVFERC

SEQ ID NO: 527 - protein, 769 aa, Artificial sequence
  hybrid human-yeast MLH1 protein with single amino acid variation
MSLRIKALDASVVNKIAAGEIIISPVNALKEMMENSIDANATMIDILVKEGGIKVLQITDNGSGINKADLPILCERFTTSKLQSFEDLASISTYGFRGEALASISHVAHVTITTITADGKCAYRASYSDGKMLESPKPVAGKDGTTILVEDLFFNIPSRLRALRSHNDEYSKILDVVGRYAIHSKDIGFSCKKFGDSNYSLSVKPSYTVQDRIRTVFNKSVASNLITFHISKVEDLNLESVDGKVCNLNFISKKSISLIFFINNRLVTCDLLRRALNSVYSNYLPKGFRPFIYLGIVIDPAAVDVNVHPTKREVRFLSQDEIIEKIANQLHAELSAIDTSRTFKASSISTNKPESLIPFNDTIESDRNRKSLRQAQVVENSYTTANSQLRKAKRQENKLVRIDASQAKITSFLSSSQQFNFEGSSTKRQLSEPKVTNVSHSQEAEKLTLNESEQPRDANTINDNDLKDQPKKKQKLGDYKVPSIADDEKNALPISKDGYIRVPKERVNVNLTSIKKLREKVDDSIHRELTDIFANLNYVGVVDEERRLAAIQHDLKLFLIDYGSVCYELFYQIGLTDFANFGKINLQSTNVSDDIVLYNLLSEFDELNDDASKEKIISKIWDMSSMLNEYYSIELVNDGLDNDLKSVKLKSLPLLLKGYIPSLVKLPFFIYRLGKEVDWEDEQECLDGILREIALLYIPDMVPKVDTLDASLSEDEKAQFINRKEHISSLLEHVLFPCIKRRFLAPRHILKDVVEIANLPDLYKVFERC

SEQ ID NO: 528 - protein, 769 aa, Artificial sequence
  hybrid human-yeast MLH1 protein with single amino acid variation
MSLRIKALDASVVNKIAAGEIIISPVNALKEMMENSIDANATMIDILVKEGGIKVLQITDNGSGINKADLPILCERFTTSKLQSFEDLASISTYGFRGEALASISHVAHVTITTKTADGKCAYRASYSDEKMLESPKPVAGKDGTTILVEDLFFNIPSRLRALRSHNDEYSKILDVVGRYAIHSKDIGFSCKKFGDSNYSLSVKPSYTVQDRIRTVFNKSVASNLITFHISKVEDLNLESVDGKVCNLNFISKKSISLIFFINNRLVTCDLLRRALNSVYSNYLPKGFRPFIYLGIVIDPAAVDVNVHPTKREVRFLSQDEIIEKIANQLHAELSAIDTSRTFKASSISTNKPESLIPFNDTIESDRNRKSLRQAQVVENSYTTANSQLRKAKRQENKLVRIDASQAKITSFLSSSQQFNFEGSSTKRQLSEPKVTNVSHSQEAEKLTLNESEQPRDANTINDNDLKDQPKKKQKLGDYKVPSIADDEKNALPISKDGYIRVPKERVNVNLTSIKKLREKVDDSIHRELTDIFANLNYVGVVDEERRLAAIQHDLKLFLIDYGSVCYELFYQIGLTDFANFGKINLQSTNVSDDIVLYNLLSEFDELNDDASKEKIISKIWDMSSMLNEYYSIELVNDGLDNDLKSVKLKSLPLLLKGYIPSLVKLPFFIYRLGKEVDWEDEQECLDGILREIALLYIPDMVPKVDTLDASLSEDEKAQFINRKEHISSLLEHVLFPCIKRRFLAPRHILKDVVEIANLPDLYKVFERC

SEQ ID NO: 529 - protein, 769 aa, Artificial sequence
  hybrid human-yeast MLH1 protein with single amino acid variation
MSLRIKALDASVVNKIAAGEIIISPVNALKEMMENSIDANATMIDILVKEGGIKVLQITDNGSGINKADLPILCERFTTSKLQSFEDLASISTYGFRGEALASISHVAHVTITTKTADGKCAYRASYSDGKMLESHKPVAGKDGTTILVEDLFFNIPSRLRALRSHNDEYSKILDVVGRYAIHSKDIGFSCKKFGDSNYSLSVKPSYTVQDRIRTVFNKSVASNLITFHISKVEDLNLESVDGKVCNLNFISKKSISLIFFINNRLVTCDLLRRALNSVYSNYLPKGFRPFIYLGIVIDPAAVDVNVHPTKREVRFLSQDEIIEKIANQLHAELSAIDTSRTFKASSISTNKPESLIPFNDTIESDRNRKSLRQAQVVENSYTTANSQLRKAKRQENKLVRIDASQAKITSFLSSSQQFNFEGSSTKRQLSEPKVTNVSHSQEAEKLTLNESEQPRDANTINDNDLKDQPKKKQKLGDYKVPSIADDEKNALPISKDGYIRVPKERVNVNLTSIKKLREKVDDSIHRELTDIFANLNYVGVVDEERRLAAIQHDLKLFLIDYGSVCYELFYQIGLTDFANFGKINLQSTNVSDDIVLYNLLSEFDELNDDASKEKIISKIWDMSSMLNEYYSIELVNDGLDNDLKSVKLKSLPLLLKGYIPSLVKLPFFIYRLGKEVDWEDEQECLDGILREIALLYIPDMVPKVDTLDASLSEDEKAQFINRKEHISSLLEHVLFPCIKRRFLAPRHILKDVVEIANLPDLYKVFERC

SEQ ID NO: 530 - protein, 769 aa, Artificial sequence
  hybrid human-yeast MLH1 protein with single amino acid variation
MSLRIKALDASVVNKIAAGEIIISPVNALKEMMENSIDANATMIDILVKEGGIKVLQITDNGSGINKADLPILCERFTTSKLQSFEDLASISTYGFRGEALASISHVAHVTITTKTADGKCAYRASYSDGKMLESPKPVVGKDGTTILVEDLFFNIPSRLRALRSHNDEYSKILDVVGRYAIHSKDIGFSCKKFGDSNYSLSVKPSYTVQDRIRTVFNKSVASNLITFHISKVEDLNLESVDGKVCNLNFISKKSISLIFFINNRLVTCDLLRRALNSVYSNYLPKGFRPFIYLGIVIDPAAVDVNVHPTKREVRFLSQDEIIEKIANQLHAELSAIDTSRTFKASSISTNKPESLIPFNDTIESDRNRKSLRQAQVVENSYTTANSQLRKAKRQENKLVRIDASQAKITSFLSSSQQFNFEGSSTKRQLSEPKVTNVSHSQEAEKLTLNESEQPRDANTINDNDLKDQPKKKQKLGDYKVPSIADDEKNALPISKDGYIRVPKERVNVNLTSIKKLREKVDDSIHRELTDIFANLNYVGVVDEERRLAAIQHDLKLFLIDYGSVCYELFYQIGLTDFANFGKINLQSTNVSDDIVLYNLLSEFDELNDDASKEKIISKIWDMSSMLNEYYSIELVNDGLDNDLKSVKLKSLPLLLKGYIPSLVKLPFFIYRLGKEVDWEDEQECLDGILREIALLYIPDMVPKVDTLDASLSEDEKAQFINRKEHISSLLEHVLFPCIKRRFLAPRHILKDVVEIANLPDLYKVFERC

SEQ ID NO: 531 - protein, 769 aa, Artificial sequence
  hybrid human-yeast MLH1 protein with single amino acid variation
MSLRIKALDASVVNKIAAGEIIISPVNALKEMMENSIDANATMIDILVKEGGIKVLQITDNGSGINKADLPILCERFTTSKLQSFEDLASISTYGFRGEALASISHVAHVTITTKTADGKCAYRASYSDGKMLESPKPVAGKDSTTILVEDLFFNIPSRLRALRSHNDEYSKILDVVGRYAIHSKDIGFSCKKFGDSNYSLSVKPSYTVQDRIRTVFNKSVASNLITFHISKVEDLNLESVDGKVCNLNFISKKSISLIFFINNRLVTCDLLRRALNSVYSNYLPKGFRPFIYLGIVIDPAAVDVNVHPTKREVRFLSQDEIIEKIANQLHAELSAIDTSRTFKASSISTNKPESLIPFNDTIESDRNRKSLRQAQVVENSYTTANSQLRKAKRQENKLVRIDASQAKITSFLSSSQQFNFEGSSTKRQLSEPKVTNVSHSQEAEKLTLNESEQPRDANTINDNDLKDQPKKKQKLGDYKVPSIADDEKNALPISKDGYIRVPKERVNVNLTSIKKLREKVDDSIHRELTDIFANLNYVGVVDEERRLAAIQHDLKLFLIDYGSVCYELFYQIGLTDFANFGKINLQSTNVSDDIVLYNLLSEFDELNDDASKEKIISKIWDMSSMLNEYYSIELVNDGLDNDLKSVKLKSLPLLLKGYIPSLVKLPFFIYRLGKEVDWEDEQECLDGILREIALLYIPDMVPKVDTLDASLSEDEKAQFINRKEHISSLLEHVLFPCIKRRFLAPRHILKDVVEIANLPDLYKVFERC

SEQ ID NO: 532 - protein, 964 aa, Saccharomyces cerevisiae
MSSTRPELKFSDVSEERNFYKKYTGLPKKPLKTIRLVDKGDYYMVIGSDAIFVADSVYHTQSVLKNCQLDPVTAKNFHEPTKYVTVSLQVLATLLKLCLLDLGYKVEIYDKGWKLIKSASPGNIEQVNELMNMNIDSSIIIASLKVQWNSQDGNCIIGVAFIDTTAYKVGMLDIVDNEVYSNLESFLIQLGVKECLVQDLTSNSNSNAEMQKVINVIDRCGCVVTLLKNSEFSEKDVELDLTKLLGDDLALSLPQKYSKLSMGACNALIGYLQLLSEQDQVGKYELVEHKLKEFMKLDASAIKALNLFPQGPQNPFGSNNLAVSGFTSAGNSGKVTSLFQLLNHCKTNAGVRLLNEWLKQPLTNIDEINKRHDLVDYLIDQIELRQMLTSEYLPMIPDIRRLTKKLNKRGNLEDVLKIYQFSKRIPEIVQVFTSFLEDDSPTEPVNELVRSVWLAPLSHHVEPLSKFEEMVETTVDLDAYEENNEFMIKVEFNEELGKIRSKLDTLRDEIHSIHLDSAEDLGFDPDKKLKLENHHLHGWCMRLTRNDAKELRKHKKYIELSTVKAGIFFSTKQLKSIANETNILQKEYDKQQSALVREIINITLTYTPVFEKLSLVLAHLDVIASFAHTSSYAPIPYIRPKLHPMDSERRTHLISSRHPVLEMQDDISFISNDVTLESGKGDFLIITGPNMGGKSTYIRQVGVISLMAQIGCFVPCEEAEIAIVDAILCRVGAGDSQLKGVSTFMVEILETASILKNASKNSLIIVDELGRGTSTYDGFGLAWAIAEHIASKIGCFALFATHFHELTELSEKLPNVKNMHVVAHIEKNLKEQKHDDEDITLLYKVEPGISDQSFGIHVAEVVQFPEKIVKMAKRKANELDDLKTNNEDLKKAKLSLQEVNEGNIRLKALLKEWIRKVKEEGLHDPSKITEEASQHKIQELLRAIANEPEKENDNYLKYIKALLL

SEQ ID NO: 533 - protein, 964 aa, Saccharomyces cerevisiae
MSSTRPELKFSDVSEERNFYKKYTGLPKKPLKTIRLVDKGDYYTVIGSDAIFVADSVYHTQSVLKNCQLDPVTAKNFHEPTKYVTVSLQVLATLLKLCLLDLGYKVEIYDKGWKLIKSASPGNIEQVNELMNMNIDSSIIIASLKVQWNSQDGNCIIGVAFIDTTAYKVGMLDIVDNEVYSNLESFLIQLGVKECLVQDLTSNSNSNAEMQKVINVIDRCGCVVTLLKNSEFSEKDVELDLTKLLGDDLALSLPQKYSKLSMGACNALIGYLQLLSEQDQVGKYELVEHKLKEFMKLDASAIKALNLFPQGPQNPFGCNNLAVSGFTSAGNSGKVTSLFQLLNHCKTNAGVRLLNEWLKQPLTNIDEINKRHDLVDYLIDQIELRQMLTSEYLPMIPDIRRLTKKLNKRGNLEDVLKIYQFSKRIPEIVQVFTSFLEDDSPTEPVNELVRSVWLAPLSHHVEPLSKFEEMVETTVDLDAYEENNEFMIKVEFNEELGKIRSKLDTLRDEIHSIHLDSAEDLGFDPDKKLKLENHHLHGWCMRLTRNDAKELRKHKKYIELSTVKAGIFFSTKQLKSIANETNILQKEYDKQQSALVREIINITLTYTPVFEKLSLVLAHLDVIASFAHTSSYAPIPYIRPKLHPMDSERRTHLISSRHPVLEMQDDISFISNDVTLESGKGDFLIITGPNMGGKSTYIRQVGVISLMAQIGCFVPCEEAEIAIVDAILCRVGAGDSQLKGVSTFMVEILETASILKNASKNSLIIVDELGRGTSTYDGFGLAWAIAEHIASKIGCFALFATHFHELTELSEKLPNVKNMHVVAHIEKNLKEQKHDDEDITLLYKVEPGISDQSFGIHVAEVVQFPEKIVKMAKRKANELDDLKTNNEDLKKAKLSLQEVNEGNIRLKALLKEWIRKVKEEGLHDPSKITEEASQHKIQELLRAIANEPEKENDNYLKYIKALLL

SEQ ID NO: 534 - protein, 955 aa, Artificial sequence
  hybrid human-yeast MSH2 protein
MSSTRPELKFSDVSEERNFYKKYTGLPKKPLKTIRLVDKGDYYTVIGSDAIFVADSVYHTQSVLKNCQLDPVTAKNFHEPTKYVTVSLQVLATLLKLCLLDLGYKVEIYDKGWKLIKSASPGNIEQVNELMNMNIDSSIIIASLKVQWNSQDGNCIIGVAFIDTTAYKVGMLDIVDNEVYSNLESFLIQLGVKECLVQDLTSNSNSNAEMQKVINVIDRCGCVVTLLKNSEFSEKDVELDLTKLLGDDLALSLPQKYSKLSMGACNALIGYLQLLSEQDQVGKYELVEHKLKEFMKLDASAIKALNLFPQGPQNPFGSNNLAVSGFTSAGNSGKVTSLFQLLNHCKTNAGVRLLNEWLKQPLTNIDEINKRHDLVDYLIDQIELRQMLTSEYLPMIPDIRRLTKKLNKRGNLEDVLKIYQFSKRIPEIVQVFTSFLEDDSPTEPVNELVRSVWLAPLSHHVEPLSKFEEMVETTVDLDAYEENNEFMIKVEFNEELGKIRSKLDTLRDEIHSIHLDSAEDLGFDPDKKLKLENHHLHGWCMRLTRNDAKELRKHKKYIELSTVKAGIFFSTKQLKSIANETNILQKEYDKQQSALVREIINITLTYTPVFEKLSLVLAHLDVIASFAHTSSYAPIPYIRPKLHPMDSERRTHLISSRHPVLEMQDDISFISNDVTLESGKGDFLIITGPNMGGKSTYIRQVGVISLMAQIGCFVPCEEAEIAIVDAILCRVGAGDSQLKGVSTFMVEILETASILRSATKDSLIIIDELGRGTSTYDGFGLAWAISEYIATKIGAFCMFATHFHELTALANQIPTVNNLHVTALTTEETLTMLYQVKKGVCDQSFGIHVAEVVQFPEKIVKMAKRKANELDDLKTNNEDLKKAKLSLQEVNEGNIRLKALLKEWIRKVKEEGLHDPSKITEEASQHKIQELLRAIANEPEKENDNYLKYIKALLL

SEQ ID NO: 535 - protein, 963 aa, Artificial sequence
  hybrid human-yeast MSH2 protein
MSSTRPELKFSDVSEERNFYKKYTGLPKKPLKTIRLVDKGDYYTVIGSDAIFVADSVYHTQSVLKNCQLDPVTAKNFHEPTKYVTVSLQVLATLLKLCLLDLGYKVEIYDKGWKLIKSASPGNIEQVNELMNMNIDSSIIIASLKVQWNSQDGNCIIGVAFIDTTAYKVGMLDIVDNEVYSNLESFLIQLGVKECLVQDLTSNSNSNAEMQKVINVIDRCGCVVTLLKNSEFSEKDVELDLTKLLGDDLALSLPQKYSKLSMGACNALIGYLQLLSEQDQVGKYELVEHKLKEFMKLDASAIKALNLFPQGPQNPFGSNNLAVSGFTSAGNSGKVTSLFQLLNHCKTNAGVRLLNEWLKQPLTNIDEINKRHDLVDYLIDQIELRQMLTSEYLPMIPDIRRLTKKLNKRGNLEDVLKIYQFSKRIPEIVQVFTSFLEDDSPTEPVNELVRSVWLAPLSHHVEPLSKFEEMVETTVDLDAYEENNEFMIKVEFNEELGKIRSKLDTLRDEIHSIHLDSAEDLGFDPDKKLKLENHHLHGWCMRLTRNDAKELRKHKKYIELSTVKAGIFFSTKQLKSIANETNILQKEYDKQQSALVREIINITLTYTPVFEKLSLVLAHLDVIASFAHTSSYAPIPYIRPAILEKGQGRIILKASRHACVEVQDEIAFIPNDVYFEKDKQMFHIITGPNMGGKSTYIRQTGVIVLMAQIGCFVPCESAEVSIVDCILARVGAGDSQLKGVSTFMAEMLETASILRSATKDSLIIIDELGRGTSTYDGFGLAWAISEYIATKIGAFCMFATHFHELTALANQIPTVNNLHVTALTTKNLKEQKHDEETLTMLYQVKKGVCDQSFGIHVAEVVQFPEKIVKMAKRKANELDDLKTNNEDLKKAKLSLQEVNEGNIRLKALLKEWIRKVKEEGLHDPSKITEEASQHKIQELLRAIANEPEKENDNYLKYIKALLL

SEQ ID NO: 536 - protein, 964 aa, Artificial sequence
  hybrid human-yeast MSH2 protein
MSSTRPELKFSDVSEERNFYKKYTGLPKKPLKTIRLVDKGDYYTVIGSDAIFVADSVYHTQSVLKNCQLDPVTAKNFHEPTKYVTVSLQVLATLLKLCLLDLGYKVEIYDKGWKLIKSASPGNIEQVNELMNMNIDSSIIIASLKVQWNSQDGNCIIGVAFIDTTAYKVGMLDIVDNEVYSNLESFLIQLGVKECLVQDLTSNSNSNAEMQKVINVIDRCGCVVTLLKNSEFSEKDVELDLTKLLGDDLALSLPQKYSKLSMGACNALIGYLQLLSEQDQVGKYELVEHKLKEFMKLDASAIKALNLFPQGPQNPFGSNNLAVSGFTSAGNSGKVTSLFQLLNHCKTNAGVRLLNEWLKQPLTNIDEINKRHDLVDYLIDQIELRQMLTSEYLPMIPDIRRLTKKLNKRGNLEDVLKIYQFSKRIPEIVQVFTSFLEDDSPTEPVNELVRSVWLAPLSHHVEPLSKFEEMVETTVDLDAYEENNEFMIKVEFNEELGKIRSKLDTLRDEIHSIHLDSAEDLGFDPDKKLKLENHHLHGWCMRLTRNDAKELRKHKKYIELSTVKAGIFFSTKQLKSIANETNILQKEYDKQQSALVREIINITLTYTPVFEKLSLVLAHLDVIASFAHTSSYAPIPYIRPKLHPMDSERRTHLISSRHPVLEMQDDISFISNDVTLESGKGDFLIITGPNMGGKSTYIRQVGVISLMAQIGCFVPCEEAEIAIVDAILCRVGAGDSQLKGVSTFMVEILETASILRSATKDSLIIIDELGRGTSTYDGFGLAWAISEYIATKIGAFCMFATHFHELTALANQIPTVNNLHVTALTTKNLKEQKHDEETLTMLYQVKKGVCDQSFGIHVAEVVQFPEKIVKMAKRKANELDDLKTNNEDLKKAKLSLQEVNEGNIRLKALLKEWIRKVKEEGLHDPSKITEEASQHKIQELLRAIANEPEKENDNYLKYIKALLL

SEQ ID NO: 537 - protein, 954 aa, Artificial sequence
  hybrid human-yeast MSH2 protein
MSSTRPELKFSDVSEERNFYKKYTGLPKKPLKTIRLVDKGDYYTVIGSDAIFVADSVYHTQSVLKNCQLDPVTAKNFHEPTKYVTVSLQVLATLLKLCLLDLGYKVEIYDKGWKLIKSASPGNIEQVNELMNMNIDSSIIIASLKVQWNSQDGNCIIGVAFIDTTAYKVGMLDIVDNEVYSNLESFLIQLGVKECLVQDLTSNSNSNAEMQKVINVIDRCGCVVTLLKNSEFSEKDVELDLTKLLGDDLALSLPQKYSKLSMGACNALIGYLQLLSEQDQVGKYELVEHKLKEFMKLDASAIKALNLFPQGPQNPFGSNNLAVSGFTSAGNSGKVTSLFQLLNHCKTNAGVRLLNEWLKQPLTNIDEINKRHDLVDYLIDQIELRQMLTSEYLPMIPDIRRLTKKLNKRGNLEDVLKIYQFSKRIPEIVQVFTSFLEDDSPTEPVNELVRSVWLAPLSHHVEPLSKFEEMVETTVDLDAYEENNEFMIKVEFNEELGKIRSKLDTLRDEIHSIHLDSAEDLGFDPDKKLKLENHHLHGWCMRLTRNDAKELRKHKKYIELSTVKAGIFFSTKQLKSIANETNILQKEYDKQQSALVREIINITLTYTPVFEKLSLVLAHLDVIASFAHTSSYAPIPYIRPAILEKGQGRIILKASRHACVEVQDEIAFIPNDVYFEKDKQMFHIITGPNMGGKSTYIRQTGVIVLMAQIGCFVPCESAEVSIVDCILARVGAGDSQLKGVSTFMAEMLETASILRSATKDSLIIIDELGRGTSTYDGFGLAWAISEYIATKIGAFCMFATHFHELTALANQIPTVNNLHVTALTTEETLTMLYQVKKGVCDQSFGIHVAEVVQFPEKIVKMAKRKANELDDLKTNNEDLKKAKLSLQEVNEGNIRLKALLKEWIRKVKEEGLHDPSKITEEASQHKIQELLRAIANEPEKENDNYLKYIKALLL

SEQ ID NO: 538 - DNA, 31 bp, Artificial sequence
  oligonucleotide sequence for making site-directed mutation in yea st MLH1 gene
caaaattgctgcagctgagatcataatatcc

SEQ ID NO: 539 - DNA, 31 bp, Artificial sequence
  oligonucleotide sequence for making site-directed mutation in yea st MLH1 gene
ggatattatgatctcagctgcagcaattttg

SEQ ID NO: 540 - DNA, 31 bp, Artificial sequence
  oligonucleotide sequence for making site-directed mutation in yea st MLH1 gene
ggaaagccccaaacgcgttgctggaaaagac

SEQ ID NO: 541 - DNA, 31 bp, Artificial sequence
  oligonucleotide sequence for making site-directed mutation in yea st MLH1 gene
gtcttttccagcaacgcgtttggggctttcc

SEQ ID NO: 542 - DNA, 37 bp, Artificial sequence
  oligonucleotide sequence for making site-directed mutation in yea st MLH1 gene
gtttactccaattatctccctcagggcaacagacctt

SEQ ID NO: 543 - DNA, 37 bp, Artificial sequence
  oligonucleotide sequence for making site-directed mutation in yea st MLH1 gene
aaggtctgttgccctgagggagataattggagtaaac

SEQ ID NO: 544 - DNA, 35 bp, Artificial sequence
  oligonucleotide sequence for making site-directed mutation in yea st MLH1 gene
tatagatccggcggccgtagttgttaacgttcacc

SEQ ID NO: 545 - DNA, 35 bp, Artificial sequence
  oligonucleotide sequence for making site-directed mutation in yea st MLH1 gene
ggtgaacgttaacaactacggccgccggatctata

SEQ ID NO: 546 - DNA, 37 bp, Artificial sequence
  oligonucleotide sequence for making site-directed mutation in yea st MLH1 gene
ctgtgaagctaaaatcgctaagcctacttttaaaagg

SEQ ID NO: 547 - DNA, 37 bp, Artificial sequence
  oligonucleotide sequence for making site-directed mutation in yea st MLH1 gene
ccttttaaaagtaggcttagcgattttagcttcacag

SEQ ID NO: 548 - DNA, 34 bp, Artificial sequence
  oligonucleotide sequence for making site-directed mutation in yea st MSH2 gene
cagggttgccgaagaagcttttaaaaaccattag

SEQ ID NO: 549 - DNA, 34 bp, Artificial sequence
  oligonucleotide sequence for making site-directed mutation in yea st MSH2 gene
ctaatggtttttaaaagcttcttcggcaaccctg

SEQ ID NO: 550 - DNA, 40 bp, Artificial sequence
  oligonucleotide sequence for making site-directed mutation in yea st MSH2 gene
gttggatctgggatataagatctacgataagggttggaaa

SEQ ID NO: 551 - DNA, 40 bp, Artificial sequence
  oligonucleotide sequence for making site-directed mutation in yea st MSH2 gene
tttccaacccttatcgtagatcttatatcccagatccaac

SEQ ID NO: 552 - DNA, 35 bp, Artificial sequence
  oligonucleotide sequence for making site-directed mutation in yea st MSH2 gene
ggtgtaaaggaatggttggtacaggacttgacatc

SEQ ID NO: 553 - DNA, 35 bp, Artificial sequence
  oligonucleotide sequence for making site-directed mutation in yea st MSH2 gene
gatgtcaagtcctgtaccaaccattcctttacacc

SEQ ID NO: 554 - DNA, 32 bp, Artificial sequence
  oligonucleotide sequence for making site-directed mutation in yea st MSH2 gene
ccacaaaatccattcgttagcaacaatttagc

SEQ ID NO: 555 - DNA, 32 bp, Artificial sequence
  oligonucleotide sequence for making site-directed mutation in yea st MSH2 gene
gctaaattgttgctaacgaatggattttgtgg

SEQ ID NO: 556 - DNA, 37 bp, Artificial sequence
  oligonucleotide sequence for making site-directed mutation in yea st MSH2 gene
cattgcaaaacaaacgctcgagttcggcttttaaatg

SEQ ID NO: 557 - DNA, 37 bp, Artificial sequence
  oligonucleotide sequence for making site-directed mutation in yea st MSH2 gene
catttaaaagccgaactcgagcgtttgttttgcaatg

SEQ ID NO: 558 - DNA, 33 bp, Artificial sequence
  oligonucleotide sequence for making site-directed mutation in yea st MSH2 gene
gaatggttgaagcagctgctgaccaatattgac

SEQ ID NO: 559 - DNA, 33 bp, Artificial sequence
  oligonucleotide sequence for making site-directed mutation in yea st MSH2 gene
gtcaatattggtcagcagctgcttcaaccattc

SEQ ID NO: 560 - DNA, 40 bp, Artificial sequence
  oligonucleotide sequence for making site-directed mutation in yea st MSH2 gene
gtccgctccgtttggttagccttaagccaccacgttgaac

SEQ ID NO: 561 - DNA, 40 bp, Artificial sequence
  oligonucleotide sequence for making site-directed mutation in yea st MSH2 gene
gttcaacgtggtggcttaaggctaaccaaacggagcggac

SEQ ID NO: 562 - DNA, 34 bp, Artificial sequence
  oligonucleotide sequence for making site-directed mutation in yea st MSH2 gene
gtttggctagctcctccatcccaccacgttgaac

SEQ ID NO: 563 - DNA, 34 bp, Artificial sequence
  oligonucleotide sequence for making site-directed mutation in yea st MSH2 gene
gttcaacgtggtgggatggaggagctagccaaac

SEQ ID NO: 564 - DNA, 35 bp, Artificial sequence
  oligonucleotide sequence for making site-directed mutation in yea st MSH2 gene
gtaatgacgccaaggagctctgtaaacataagaag

SEQ ID NO: 565 - DNA, 35 bp, Artificial sequence
  oligonucleotide sequence for making site-directed mutation in yea st MSH2 gene
cttcttatgtttacagagctccttggcgtcattac

SEQ ID NO: 566 - DNA, 37 bp, Artificial sequence
  oligonucleotide sequence for making site-directed mutation in yea st MSH2 gene
caattaaagtcaatcgcgaatgtaaccaatattcttc

SEQ ID NO: 567 - DNA, 37 bp, Artificial sequence
  oligonucleotide sequence for making site-directed mutation in yea st MSH2 gene
gaagaatattggttacattcgcgattgactttaattg

SEQ ID NO: 568 - DNA, 33 bp, Artificial sequence
  oligonucleotide sequence for making site-directed mutation in yea st MSH2 gene
gttagagaaattatatcgattacattaacgtac

SEQ ID NO: 569 - DNA, 33 bp, Artificial sequence
  oligonucleotide sequence for making site-directed mutation in yea st MSH2 gene
gtacgttaatgtaatcgatataatttctctaac

SEQ ID NO: 570 - DNA, 36 bp, Artificial sequence
  oligonucleotide sequence for making site-directed mutation in yea st MSH2 gene
caccagtttttgaaaaaagatctttagtcttagcgc

SEQ ID NO: 571 - DNA, 36 bp, Artificial sequence
  oligonucleotide sequence for making site-directed mutation in yea st MSH2 gene
gcgctaagactaaagatcttttttcaaaaactggtg

SEQ ID NO: 572 - DNA, 33 bp, Artificial sequence
  oligonucleotide sequence for making site-directed mutation in yea st MSH2 gene
cttagcgcatttaaatgtcattgcctcttttgc

SEQ ID NO: 573 - DNA, 33 bp, Artificial sequence
  oligonucleotide sequence for making site-directed mutation in yea st MSH2 gene
gcaaaagaggcaatgacatttaaatgcgctaag

SEQ ID NO: 574 - DNA, 33 bp, Artificial sequence
  oligonucleotide sequence for making site-directed mutation in yea st MSH2 gene
cctataccatacattcgaaccaagttgcatccc

SEQ ID NO: 575 - DNA, 33 bp, Artificial sequence
  oligonucleotide sequence for making site-directed mutation in yea st MSH2 gene
gggatgcaacttggttcgaatgtatggtatagg

SEQ ID NO: 576 - DNA, 32 bp, Artificial sequence
  oligonucleotide sequence for making site-directed mutation in yea st MSH2 gene
ccaattgaaagggatatccacatttatggttg

SEQ ID NO: 577 - DNA, 32 bp, Artificial sequence
  oligonucleotide sequence for making site-directed mutation in yea st MSH2 gene
caaccataaatgtggatatccctttcaattgg

SEQ ID NO: 578 - protein, 769 aa, Saccharomyces cerevisiae
MSLRIKALDASVVNKIAAAEIIISPVNALKEMMENSIDANATMIDILVKEGGIKVLQITDNGSGINKADLPILCERFTTSKLQKFEDLSQIQTYGFRGEALASISHVARVTVTTKVKEDRCAWRVSYAEGKMLESPKPVAGKDGTTILVEDLFFNIPSRLRALRSHNDEYSKILDVVGRYAIHSKDIGFSCKKFGDSNYSLSVKPSYTVQDRIRTVFNKSVASNLITFHISKVEDLNLESVDGKVCNLNFISKKSISLIFFINNRLVTCDLLRRALNSVYSNYLPKGFRPFIYLGIVIDPAAVDVNVHPTKREVRFLSQDEIIEKIANQLHAELSAIDTSRTFKASSISTNKPESLIPFNDTIESDRNRKSLRQAQVVENSYTTANSQLRKAKRQENKLVRIDASQAKITSFLSSSQQFNFEGSSTKRQLSEPKVTNVSHSQEAEKLTLNESEQPRDANTINDNDLKDQPKKKQKLGDYKVPSIADDEKNALPISKDGYIRVPKERVNVNLTSIKKLREKVDDSIHRELTDIFANLNYVGVVDEERRLAAIQHDLKLFLIDYGSVCYELFYQIGLTDFANFGKINLQSTNVSDDIVLYNLLSEFDELNDDASKEKIISKIWDMSSMLNEYYSIELVNDGLDNDLKSVKLKSLPLLLKGYIPSLVKLPFFIYRLGKEVDWEDEQECLDGILREIALLYIPDMVPKVDTLDASLSEDEKAQFINRKEHISSLLEHVLFPCIKRRFLAPRHILKDVVEIANLPDLYKVFERC

SEQ ID NO: 579 - protein, 769 aa, Saccharomyces cerevisiae
MSLRIKALDASVVNKIAAGEIIISPVNALKEMMENSIDANATMIDILVKEGGIKVLQITDNGSGINKADLPILCERFTTSKLQKFEDLSQIQTYGFRGEALASISHVARVTVTTKVKEDRCAWRVSYAEGKMLESPKRVAGKDGTTILVEDLFFNIPSRLRALRSHNDEYSKILDVVGRYAIHSKDIGFSCKKFGDSNYSLSVKPSYTVQDRIRTVFNKSVASNLITFHISKVEDLNLESVDGKVCNLNFISKKSISLIFFINNRLVTCDLLRRALNSVYSNYLPKGFRPFIYLGIVIDPAAVDVNVHPTKREVRFLSQDEIIEKIANQLHAELSAIDTSRTFKASSISTNKPESLIPFNDTIESDRNRKSLRQAQVVENSYTTANSQLRKAKRQENKLVRIDASQAKITSFLSSSQQFNFEGSSTKRQLSEPKVTNVSHSQEAEKLTLNESEQPRDANTINDNDLKDQPKKKQKLGDYKVPSIADDEKNALPISKDGYIRVPKERVNVNLTSIKKLREKVDDSIHRELTDIFANLNYVGVVDEERRLAAIQHDLKLFLIDYGSVCYELFYQIGLTDFANFGKINLQSTNVSDDIVLYNLLSEFDELNDDASKEKIISKIWDMSSMLNEYYSIELVNDGLDNDLKSVKLKSLPLLLKGYIPSLVKLPFFIYRLGKEVDWEDEQECLDGILREIALLYIPDMVPKVDTLDASLSEDEKAQFINRKEHISSLLEHVLFPCIKRRFLAPRHILKDVVEIANLPDLYKVFERC

SEQ ID NO: 580 - protein, 769 aa, Saccharomyces cerevisiae
MSLRIKALDASVVNKIAAGEIIISPVNALKEMMENSIDANATMIDILVKEGGIKVLQITDNGSGINKADLPILCERFTTSKLQKFEDLSQIQTYGFRGEALASISHVARVTVTTKVKEDRCAWRVSYAEGKMLESPKPVAGKDGTTILVEDLFFNIPSRLRALRSHNDEYSKILDVVGRYAIHSKDIGFSCKKFGDSNYSLSVKPSYTVQDRIRTVFNKSVASNLITFHISKVEDLNLESVDGKVCNLNFISKKSISLIFFINNRLVTCDLLRRALNSVYSNYLPQGFRPFIYLGIVIDPAAVDVNVHPTKREVRFLSQDEIIEKIANQLHAELSAIDTSRTFKASSISTNKPESLIPFNDTIESDRNRKSLRQAQVVENSYTTANSQLRKAKRQENKLVRIDASQAKITSFLSSSQQFNFEGSSTKRQLSEPKVTNVSHSQEAEKLTLNESEQPRDANTINDNDLKDQPKKKQKLGDYKVPSIADDEKNALPISKDGYIRVPKERVNVNLTSIKKLREKVDDSIHRELTDIFANLNYVGVVDEERRLAAIQHDLKLFLIDYGSVCYELFYQIGLTDFANFGKINLQSTNVSDDIVLYNLLSEFDELNDDASKEKIISKIWDMSSMLNEYYSIELVNDGLDNDLKSVKLKSLPLLLKGYIPSLVKLPFFIYRLGKEVDWEDEQECLDGILREIALLYIPDMVPKVDTLDASLSEDEKAQFINRKEHISSLLEHVLFPCIKRRFLAPRHILKDVVEIANLPDLYKVFERC

SEQ ID NO: 581 - protein, 769 aa, Saccharomyces cerevisiae
MSLRIKALDASVVNKIAAGEIIISPVNALKEMMENSIDANATMIDILVKEGGIKVLQITDNGSGINKADLPILCERFTTSKLQKFEDLSQIQTYGFRGEALASISHVARVTVTTKVKEDRCAWRVSYAEGKMLESPKPVAGKDGTTILVEDLFFNIPSRLRALRSHNDEYSKILDVVGRYAIHSKDIGFSCKKFGDSNYSLSVKPSYTVQDRIRTVFNKSVASNLITFHISKVEDLNLESVDGKVCNLNFISKKSISLIFFINNRLVTCDLLRRALNSVYSNYLPKGFRPFIYLGIVIDPAAVVVNVHPTKREVRFLSQDEIIEKIANQLHAELSAIDTSRTFKASSISTNKPESLIPFNDTIESDRNRKSLRQAQVVENSYTTANSQLRKAKRQENKLVRIDASQAKITSFLSSSQQFNFEGSSTKRQLSEPKVTNVSHSQEAEKLTLNESEQPRDANTINDNDLKDQPKKKQKLGDYKVPSIADDEKNALPISKDGYIRVPKERVNVNLTSIKKLREKVDDSIHRELTDIFANLNYVGVVDEERRLAAIQHDLKLFLIDYGSVCYELFYQIGLTDFANFGKINLQSTNVSDDIVLYNLLSEFDELNDDASKEKIISKIWDMSSMLNEYYSIELVNDGLDNDLKSVKLKSLPLLLKGYIPSLVKLPFFIYRLGKEVDWEDEQECLDGILREIALLYIPDMVPKVDTLDASLSEDEKAQFINRKEHISSLLEHVLFPCIKRRFLAPRHILKDVVEIANLPDLYKVFERC

SEQ ID NO: 582 - protein, 769 aa, Saccharomyces cerevisiae
MSLRIKALDASVVNKIAAGEIIISPVNALKEMMENSIDANATMIDILVKEGGIKVLQITDNGSGINKADLPILCERFTTSKLQKFEDLSQIQTYGFRGEALASISHVARVTVTTKVKEDRCAWRVSYAEGKMLESPKPVAGKDGTTILVEDLFFNIPSRLRALRSHNDEYSKILDVVGRYAIHSKDIGFSCKKFGDSNYSLSVKPSYTVQDRIRTVFNKSVASNLITFHISKVEDLNLESVDGKVCNLNFISKKSISLIFFINNRLVTCDLLRRALNSVYSNYLPKGFRPFIYLGIVIDPAAVDVNVHPTKREVRFLSQDEIIEKIANQLHAELSAIDTSRTFKASSISTNKPESLIPFNDTIESDRNRKSLRQAQVVENSYTTANSQLRKAKRQENKLVRIDASQAKITSFLSSSQQFNFEGSSTKRQLSEPKVTNVSHSQEAEKLTLNESEQPRDANTINDNDLKDQPKKKQKLGDYKVPSIADDEKNALPISKDGYIRVPKERVNVNLTSIKKLREKVDDSIHRELTDIFANLNYVGVVDEERRLAAIQHDLKLFLIDYGSVCYELFYQIGLTDFANFGKINLQSTNVSDDIVLYNLLSEFDELNDDASKEKIISKIWDMSSMLNEYYSIELVNDGLDNDLKSVKLKSLSLLLKGYIPSLVKLPFFIYRLGKEVDWEDEQECLDGILREIALLYIPDMVPKVDTLDASLSEDEKAQFINRKEHISSLLEHVLFPCIKRRFLAPRHILKDVVEIANLPDLYKVFERC

SEQ ID NO: 583 - protein, 964 aa, Saccharomyces cerevisiae
MSSTRPELKFSDVSEERNFYKKYTGLPKKLLKTIRLVDKGDYYTVIGSDAIFVADSVYHTQSVLKNCQLDPVTAKNFHEPTKYVTVSLQVLATLLKLCLLDLGYKVEIYDKGWKLIKSASPGNIEQVNELMNMNIDSSIIIASLKVQWNSQDGNCIIGVAFIDTTAYKVGMLDIVDNEVYSNLESFLIQLGVKECLVQDLTSNSNSNAEMQKVINVIDRCGCVVTLLKNSEFSEKDVELDLTKLLGDDLALSLPQKYSKLSMGACNALIGYLQLLSEQDQVGKYELVEHKLKEFMKLDASAIKALNLFPQGPQNPFGSNNLAVSGFTSAGNSGKVTSLFQLLNHCKTNAGVRLLNEWLKQPLTNIDEINKRHDLVDYLIDQIELRQMLTSEYLPMIPDIRRLTKKLNKRGNLEDVLKIYQFSKRIPEIVQVFTSFLEDDSPTEPVNELVRSVWLAPLSHHVEPLSKFEEMVETTVDLDAYEENNEFMIKVEFNEELGKIRSKLDTLRDEIHSIHLDSAEDLGFDPDKKLKLENHHLHGWCMRLTRNDAKELRKHKKYIELSTVKAGIFFSTKQLKSIANETNILQKEYDKQQSALVREIINITLTYTPVFEKLSLVLAHLDVIASFAHTSSYAPIPYIRPKLHPMDSERRTHLISSRHPVLEMQDDISFISNDVTLESGKGDFLIITGPNMGGKSTYIRQVGVISLMAQIGCFVPCEEAEIAIVDAILCRVGAGDSQLKGVSTFMVEILETASILKNASKNSLIIVDELGRGTSTYDGFGLAWAIAEHIASKIGCFALFATHFHELTELSEKLPNVKNMHVVAHIEKNLKEQKHDDEDITLLYKVEPGISDQSFGIHVAEVVQFPEKIVKMAKRKANELDDLKTNNEDLKKAKLSLQEVNEGNIRLKALLKEWIRKVKEEGLHDPSKITEEASQHKIQELLRAIANEPEKENDNYLKYIKALLL

SEQ ID NO: 584 - protein, 962 aa, Saccharomyces cerevisiae
MSSTRPELKFSDVSEERNFYKKYTGLPKKPLKTIRLVDKGDYYTVIGSDAIFVADSVYHTQSVLKNCQLDPVTAKNFHEPTKYVTVSLQVLATLLKLCLLDLGYKIYDKGWKLIKSASPGNIEQVNELMNMNIDSSIIIASLKVQWNSQDGNCIIGVAFIDTTAYKVGMLDIVDNEVYSNLESFLIQLGVKECLVQDLTSNSNSNAEMQKVINVIDRCGCVVTLLKNSEFSEKDVELDLTKLLGDDLALSLPQKYSKLSMGACNALIGYLQLLSEQDQVGKYELVEHKLKEFMKLDASAIKALNLFPQGPQNPFGSNNLAVSGFTSAGNSGKVTSLFQLLNHCKTNAGVRLLNEWLKQPLTNIDEINKRHDLVDYLIDQIELRQMLTSEYLPMIPDIRRLTKKLNKRGNLEDVLKIYQFSKRIPEIVQVFTSFLEDDSPTEPVNELVRSVWLAPLSHHVEPLSKFEEMVETTVDLDAYEENNEFMIKVEFNEELGKIRSKLDTLRDEIHSIHLDSAEDLGFDPDKKLKLENHHLHGWCMRLTRNDAKELRKHKKYIELSTVKAGIFFSTKQLKSIANETNILQKEYDKQQSALVREIINITLTYTPVFEKLSLVLAHLDVIASFAHTSSYAPIPYIRPKLHPMDSERRTHLISSRHPVLEMQDDISFISNDVTLESGKGDFLIITGPNMGGKSTYIRQVGVISLMAQIGCFVPCEEAEIAIVDAILCRVGAGDSQLKGVSTFMVEILETASILKNASKNSLIIVDELGRGTSTYDGFGLAWAIAEHIASKIGCFALFATHFHELTELSEKLPNVKNMHVVAHIEKNLKEQKHDDEDITLLYKVEPGISDQSFGIHVAEVVQFPEKIVKMAKRKANELDDLKTNNEDLKKAKLSLQEVNEGNIRLKALLKEWIRKVKEEGLHDPSKITEEASQHKIQELLRAIANEPEKENDNYLKYIKALLL

SEQ ID NO: 585 - protein, 964 aa, Saccharomyces cerevisiae
MSSTRPELKFSDVSEERNFYKKYTGLPKKPLKTIRLVDKGDYYTVIGSDAIFVADSVYHTQSVLKNCQLDPVTAKNFHEPTKYVTVSLQVLATLLKLCLLDLGYKVEIYDKGWKLIKSASPGNIEQVNELMNMNIDSSIIIASLKVQWNSQDGNCIIGVAFIDTTAYKVGMLDIVDNEVYSNLESFLIQLGVKEWLVQDLTSNSNSNAEMQKVINVIDRCGCVVTLLKNSEFSEKDVELDLTKLLGDDLALSLPQKYSKLSMGACNALIGYLQLLSEQDQVGKYELVEHKLKEFMKLDASAIKALNLFPQGPQNPFGSNNLAVSGFTSAGNSGKVTSLFQLLNHCKTNAGVRLLNEWLKQPLTNIDEINKRHDLVDYLIDQIELRQMLTSEYLPMIPDIRRLTKKLNKRGNLEDVLKIYQFSKRIPEIVQVFTSFLEDDSPTEPVNELVRSVWLAPLSHHVEPLSKFEEMVETTVDLDAYEENNEFMIKVEFNEELGKIRSKLDTLRDEIHSIHLDSAEDLGFDPDKKLKLENHHLHGWCMRLTRNDAKELRKHKKYIELSTVKAGIFFSTKQLKSIANETNILQKEYDKQQSALVREIINITLTYTPVFEKLSLVLAHLDVIASFAHTSSYAPIPYIRPKLHPMDSERRTHLISSRHPVLEMQDDISFISNDVTLESGKGDFLIITGPNMGGKSTYIRQVGVISLMAQIGCFVPCEEAEIAIVDAILCRVGAGDSQLKGVSTFMVEILETASILKNASKNSLIIVDELGRGTSTYDGFGLAWAIAEHIASKIGCFALFATHFHELTELSEKLPNVKNMHVVAHIEKNLKEQKHDDEDITLLYKVEPGISDQSFGIHVAEVVQFPEKIVKMAKRKANELDDLKTNNEDLKKAKLSLQEVNEGNIRLKALLKEWIRKVKEEGLHDPSKITEEASQHKIQELLRAIANEPEKENDNYLKYIKALLL

SEQ ID NO: 586 - protein, 964 aa, Saccharomyces cerevisiae
MSSTRPELKFSDVSEERNFYKKYTGLPKKPLKTIRLVDKGDYYTVIGSDAIFVADSVYHTQSVLKNCQLDPVTAKNFHEPTKYVTVSLQVLATLLKLCLLDLGYKVEIYDKGWKLIKSASPGNIEQVNELMNMNIDSSIIIASLKVQWNSQDGNCIIGVAFIDTTAYKVGMLDIVDNEVYSNLESFLIQLGVKECLVQDLTSNSNSNAEMQKVINVIDRCGCVVTLLKNSEFSEKDVELDLTKLLGDDLALSLPQKYSKLSMGACNALIGYLQLLSEQDQVGKYELVEHKLKEFMKLDASAIKALNLFPQGPQNPFVSNNLAVSGFTSAGNSGKVTSLFQLLNHCKTNAGVRLLNEWLKQPLTNIDEINKRHDLVDYLIDQIELRQMLTSEYLPMIPDIRRLTKKLNKRGNLEDVLKIYQFSKRIPEIVQVFTSFLEDDSPTEPVNELVRSVWLAPLSHHVEPLSKFEEMVETTVDLDAYEENNEFMIKVEFNEELGKIRSKLDTLRDEIHSIHLDSAEDLGFDPDKKLKLENHHLHGWCMRLTRNDAKELRKHKKYIELSTVKAGIFFSTKQLKSIANETNILQKEYDKQQSALVREIINITLTYTPVFEKLSLVLAHLDVIASFAHTSSYAPIPYIRPKLHPMDSERRTHLISSRHPVLEMQDDISFISNDVTLESGKGDFLIITGPNMGGKSTYIRQVGVISLMAQIGCFVPCEEAEIAIVDAILCRVGAGDSQLKGVSTFMVEILETASILKNASKNSLIIVDELGRGTSTYDGFGLAWAIAEHIASKIGCFALFATHFHELTELSEKLPNVKNMHVVAHIEKNLKEQKHDDEDITLLYKVEPGISDQSFGIHVAEVVQFPEKIVKMAKRKANELDDLKTNNEDLKKAKLSLQEVNEGNIRLKALLKEWIRKVKEEGLHDPSKITEEASQHKIQELLRAIANEPEKENDNYLKYIKALLL

SEQ ID NO: 587 - protein, 964 aa, Saccharomyces cerevisiae
MSSTRPELKFSDVSEERNFYKKYTGLPKKPLKTIRLVDKGDYYTVIGSDAIFVADSVYHTQSVLKNCQLDPVTAKNFHEPTKYVTVSLQVLATLLKLCLLDLGYKVEIYDKGWKLIKSASPGNIEQVNELMNMNIDSSIIIASLKVQWNSQDGNCIIGVAFIDTTAYKVGMLDIVDNEVYSNLESFLIQLGVKECLVQDLTSNSNSNAEMQKVINVIDRCGCVVTLLKNSEFSEKDVELDLTKLLGDDLALSLPQKYSKLSMGACNALIGYLQLLSEQDQVGKYELVEHKLKEFMKLDASAIKALNLFPQGPQNPFGSNNLAVSGFTSAGNSGKVTSLFQLLNHCKTNARVRLLNEWLKQPLTNIDEINKRHDLVDYLIDQIELRQMLTSEYLPMIPDIRRLTKKLNKRGNLEDVLKIYQFSKRIPEIVQVFTSFLEDDSPTEPVNELVRSVWLAPLSHHVEPLSKFEEMVETTVDLDAYEENNEFMIKVEFNEELGKIRSKLDTLRDEIHSIHLDSAEDLGFDPDKKLKLENHHLHGWCMRLTRNDAKELRKHKKYIELSTVKAGIFFSTKQLKSIANETNILQKEYDKQQSALVREIINITLTYTPVFEKLSLVLAHLDVIASFAHTSSYAPIPYIRPKLHPMDSERRTHLISSRHPVLEMQDDISFISNDVTLESGKGDFLIITGPNMGGKSTYIRQVGVISLMAQIGCFVPCEEAEIAIVDAILCRVGAGDSQLKGVSTFMVEILETASILKNASKNSLIIVDELGRGTSTYDGFGLAWAIAEHIASKIGCFALFATHFHELTELSEKLPNVKNMHVVAHIEKNLKEQKHDDEDITLLYKVEPGISDQSFGIHVAEVVQFPEKIVKMAKRKANELDDLKTNNEDLKKAKLSLQEVNEGNIRLKALLKEWIRKVKEEGLHDPSKITEEASQHKIQELLRAIANEPEKENDNYLKYIKALLL

SEQ ID NO: 588 - protein, 964 aa, Saccharomyces cerevisiae
MSSTRPELKFSDVSEERNFYKKYTGLPKKPLKTIRLVDKGDYYTVIGSDAIFVADSVYHTQSVLKNCQLDPVTAKNFHEPTKYVTVSLQVLATLLKLCLLDLGYKVEIYDKGWKLIKSASPGNIEQVNELMNMNIDSSIIIASLKVQWNSQDGNCIIGVAFIDTTAYKVGMLDIVDNEVYSNLESFLIQLGVKECLVQDLTSNSNSNAEMQKVINVIDRCGCVVTLLKNSEFSEKDVELDLTKLLGDDLALSLPQKYSKLSMGACNALIGYLQLLSEQDQVGKYELVEHKLKEFMKLDASAIKALNLFPQGPQNPFGSNNLAVSGFTSAGNSGKVTSLFQLLNHCKTNAGVRLLNEWLKQLLTNIDEINKRHDLVDYLIDQIELRQMLTSEYLPMIPDIRRLTKKLNKRGNLEDVLKIYQFSKRIPEIVQVFTSFLEDDSPTEPVNELVRSVWLAPLSHHVEPLSKFEEMVETTVDLDAYEENNEFMIKVEFNEELGKIRSKLDTLRDEIHSIHLDSAEDLGFDPDKKLKLENHHLHGWCMRLTRNDAKELRKHKKYIELSTVKAGIFFSTKQLKSIANETNILQKEYDKQQSALVREIINITLTYTPVFEKLSLVLAHLDVIASFAHTSSYAPIPYIRPKLHPMDSERRTHLISSRHPVLEMQDDISFISNDVTLESGKGDFLIITGPNMGGKSTYIRQVGVISLMAQIGCFVPCEEAEIAIVDAILCRVGAGDSQLKGVSTFMVEILETASILKNASKNSLIIVDELGRGTSTYDGFGLAWAIAEHIASKIGCFALFATHFHELTELSEKLPNVKNMHVVAHIEKNLKEQKHDDEDITLLYKVEPGISDQSFGIHVAEVVQFPEKIVKMAKRKANELDDLKTNNEDLKKAKLSLQEVNEGNIRLKALLKEWIRKVKEEGLHDPSKITEEASQHKIQELLRAIANEPEKENDNYLKYIKALLL

SEQ ID NO: 589 - protein, 963 aa, Saccharomyces cerevisiae
MSSTRPELKFSDVSEERNFYKKYTGLPKKPLKTIRLVDKGDYYTVIGSDAIFVADSVYHTQSVLKNCQLDPVTAKNFHEPTKYVTVSLQVLATLLKLCLLDLGYKVEIYDKGWKLIKSASPGNIEQVNELMNMNIDSSIIIASLKVQWNSQDGNCIIGVAFIDTTAYKVGMLDIVDNEVYSNLESFLIQLGVKECLVQDLTSNSNSNAEMQKVINVIDRCGCVVTLLKNSEFSEKDVELDLTKLLGDDLALSLPQKYSKLSMGACNALIGYLQLLSEQDQVGKYELVEHKLKEFMKLDASAIKALNLFPQGPQNPFGSNNLAVSGFTSAGNSGKVTSLFQLLNHCKTNAGVRLLNEWLKQPLTNIDEINKRHDLVDYLIDQIELRQMLTSEYLPMIPDIRRLTKKLNKRGNLEDVLKIYQFSKRIPEIVQVFTSFLEDDSPTEPVNELVRSVWLALSHHVEPLSKFEEMVETTVDLDAYEENNEFMIKVEFNEELGKIRSKLDTLRDEIHSIHLDSAEDLGFDPDKKLKLENHHLHGWCMRLTRNDAKELRKHKKYIELSTVKAGIFFSTKQLKSIANETNILQKEYDKQQSALVREIINITLTYTPVFEKLSLVLAHLDVIASFAHTSSYAPIPYIRPKLHPMDSERRTHLISSRHPVLEMQDDISFISNDVTLESGKGDFLIITGPNMGGKSTYIRQVGVISLMAQIGCFVPCEEAEIAIVDAILCRVGAGDSQLKGVSTFMVEILETASILKNASKNSLIIVDELGRGTSTYDGFGLAWAIAEHIASKIGCFALFATHFHELTELSEKLPNVKNMHVVAHIEKNLKEQKHDDEDITLLYKVEPGISDQSFGIHVAEVVQFPEKIVKMAKRKANELDDLKTNNEDLKKAKLSLQEVNEGNIRLKALLKEWIRKVKEEGLHDPSKITEEASQHKIQELLRAIANEPEKENDNYLKYIKALLL

SEQ ID NO: 590 - protein, 964 aa, Saccharomyces cerevisiae
MSSTRPELKFSDVSEERNFYKKYTGLPKKPLKTIRLVDKGDYYTVIGSDAIFVADSVYHTQSVLKNCQLDPVTAKNFHEPTKYVTVSLQVLATLLKLCLLDLGYKVEIYDKGWKLIKSASPGNIEQVNELMNMNIDSSIIIASLKVQWNSQDGNCIIGVAFIDTTAYKVGMLDIVDNEVYSNLESFLIQLGVKECLVQDLTSNSNSNAEMQKVINVIDRCGCVVTLLKNSEFSEKDVELDLTKLLGDDLALSLPQKYSKLSMGACNALIGYLQLLSEQDQVGKYELVEHKLKEFMKLDASAIKALNLFPQGPQNPFGSNNLAVSGFTSAGNSGKVTSLFQLLNHCKTNAGVRLLNEWLKQPLTNIDEINKRHDLVDYLIDQIELRQMLTSEYLPMIPDIRRLTKKLNKRGNLEDVLKIYQFSKRIPEIVQVFTSFLEDDSPTEPVNELVRSVWLAPPSHHVEPLSKFEEMVETTVDLDAYEENNEFMIKVEFNEELGKIRSKLDTLRDEIHSIHLDSAEDLGFDPDKKLKLENHHLHGWCMRLTRNDAKELRKHKKYIELSTVKAGIFFSTKQLKSIANETNILQKEYDKQQSALVREIINITLTYTPVFEKLSLVLAHLDVIASFAHTSSYAPIPYIRPKLHPMDSERRTHLISSRHPVLEMQDDISFISNDVTLESGKGDFLIITGPNMGGKSTYIRQVGVISLMAQIGCFVPCEEAEIAIVDAILCRVGAGDSQLKGVSTFMVEILETASILKNASKNSLIIVDELGRGTSTYDGFGLAWAIAEHIASKIGCFALFATHFHELTELSEKLPNVKNMHVVAHIEKNLKEQKHDDEDITLLYKVEPGISDQSFGIHVAEVVQFPEKIVKMAKRKANELDDLKTNNEDLKKAKLSLQEVNEGNIRLKALLKEWIRKVKEEGLHDPSKITEEASQHKIQELLRAIANEPEKENDNYLKYIKALLL

SEQ ID NO: 591 - protein, 964 aa, Saccharomyces cerevisiae
MSSTRPELKFSDVSEERNFYKKYTGLPKKPLKTIRLVDKGDYYTVIGSDAIFVADSVYHTQSVLKNCQLDPVTAKNFHEPTKYVTVSLQVLATLLKLCLLDLGYKVEIYDKGWKLIKSASPGNIEQVNELMNMNIDSSIIIASLKVQWNSQDGNCIIGVAFIDTTAYKVGMLDIVDNEVYSNLESFLIQLGVKECLVQDLTSNSNSNAEMQKVINVIDRCGCVVTLLKNSEFSEKDVELDLTKLLGDDLALSLPQKYSKLSMGACNALIGYLQLLSEQDQVGKYELVEHKLKEFMKLDASAIKALNLFPQGPQNPFGSNNLAVSGFTSAGNSGKVTSLFQLLNHCKTNAGVRLLNEWLKQPLTNIDEINKRHDLVDYLIDQIELRQMLTSEYLPMIPDIRRLTKKLNKRGNLEDVLKIYQFSKRIPEIVQVFTSFLEDDSPTEPVNELVRSVWLAPLSHHVEPLSKFEEMVETTVDLDAYEENNEFMIKVEFNEELGKIRSKLDTLRDEIHSIHLDSAEDLGFDPDKKLKLENHHLHGWCMRLTRNDAKELCKHKKYIELSTVKAGIFFSTKQLKSIANETNILQKEYDKQQSALVREIINITLTYTPVFEKLSLVLAHLDVIASFAHTSSYAPIPYIRPKLHPMDSERRTHLISSRHPVLEMQDDISFISNDVTLESGKGDFLIITGPNMGGKSTYIRQVGVISLMAQIGCFVPCEEAEIAIVDAILCRVGAGDSQLKGVSTFMVEILETASILKNASKNSLIIVDELGRGTSTYDGFGLAWAIAEHIASKIGCFALFATHFHELTELSEKLPNVKNMHVVAHIEKNLKEQKHDDEDITLLYKVEPGISDQSFGIHVAEVVQFPEKIVKMAKRKANELDDLKTNNEDLKKAKLSLQEVNEGNIRLKALLKEWIRKVKEEGLHDPSKITEEASQHKIQELLRAIANEPEKENDNYLKYIKALLL

SEQ ID NO: 592 - protein, 964 aa, Saccharomyces cerevisiae
MSSTRPELKFSDVSEERNFYKKYTGLPKKPLKTIRLVDKGDYYTVIGSDAIFVADSVYHTQSVLKNCQLDPVTAKNFHEPTKYVTVSLQVLATLLKLCLLDLGYKVEIYDKGWKLIKSASPGNIEQVNELMNMNIDSSIIIASLKVQWNSQDGNCIIGVAFIDTTAYKVGMLDIVDNEVYSNLESFLIQLGVKECLVQDLTSNSNSNAEMQKVINVIDRCGCVVTLLKNSEFSEKDVELDLTKLLGDDLALSLPQKYSKLSMGACNALIGYLQLLSEQDQVGKYELVEHKLKEFMKLDASAIKALNLFPQGPQNPFGSNNLAVSGFTSAGNSGKVTSLFQLLNHCKTNAGVRLLNEWLKQPLTNIDEINKRHDLVDYLIDQIELRQMLTSEYLPMIPDIRRLTKKLNKRGNLEDVLKIYQFSKRIPEIVQVFTSFLEDDSPTEPVNELVRSVWLAPLSHHVEPLSKFEEMVETTVDLDAYEENNEFMIKVEFNEELGKIRSKLDTLRDEIHSIHLDSAEDLGFDPDKKLKLENHHLHGWCMRLTRNDAKELRKHKKYIELSTVKAGIFFSTKQLKSIANVTNILQKEYDKQQSALVREIINITLTYTPVFEKLSLVLAHLDVIASFAHTSSYAPIPYIRPKLHPMDSERRTHLISSRHPVLEMQDDISFISNDVTLESGKGDFLIITGPNMGGKSTYIRQVGVISLMAQIGCFVPCEEAEIAIVDAILCRVGAGDSQLKGVSTFMVEILETASILKNASKNSLIIVDELGRGTSTYDGFGLAWAIAEHIASKIGCFALFATHFHELTELSEKLPNVKNMHVVAHIEKNLKEQKHDDEDITLLYKVEPGISDQSFGIHVAEVVQFPEKIVKMAKRKANELDDLKTNNEDLKKAKLSLQEVNEGNIRLKALLKEWIRKVKEEGLHDPSKITEEASQHKIQELLRAIANEPEKENDNYLKYIKALLL

SEQ ID NO: 593 - protein, 964 aa, Saccharomyces cerevisiae
MSSTRPELKFSDVSEERNFYKKYTGLPKKPLKTIRLVDKGDYYTVIGSDAIFVADSVYHTQSVLKNCQLDPVTAKNFHEPTKYVTVSLQVLATLLKLCLLDLGYKVEIYDKGWKLIKSASPGNIEQVNELMNMNIDSSIIIASLKVQWNSQDGNCIIGVAFIDTTAYKVGMLDIVDNEVYSNLESFLIQLGVKECLVQDLTSNSNSNAEMQKVINVIDRCGCVVTLLKNSEFSEKDVELDLTKLLGDDLALSLPQKYSKLSMGACNALIGYLQLLSEQDQVGKYELVEHKLKEFMKLDASAIKALNLFPQGPQNPFGSNNLAVSGFTSAGNSGKVTSLFQLLNHCKTNAGVRLLNEWLKQPLTNIDEINKRHDLVDYLIDQIELRQMLTSEYLPMIPDIRRLTKKLNKRGNLEDVLKIYQFSKRIPEIVQVFTSFLEDDSPTEPVNELVRSVWLAPLSHHVEPLSKFEEMVETTVDLDAYEENNEFMIKVEFNEELGKIRSKLDTLRDEIHSIHLDSAEDLGFDPDKKLKLENHHLHGWCMRLTRNDAKELRKHKKYIELSTVKAGIFFSTKQLKSIANETNILQKEYDKQQSALVREIISITLTYTPVFEKLSLVLAHLDVIASFAHTSSYAPIPYIRPKLHPMDSERRTHLISSRHPVLEMQDDISFISNDVTLESGKGDFLIITGPNMGGKSTYIRQVGVISLMAQIGCFVPCEEAEIAIVDAILCRVGAGDSQLKGVSTFMVEILETASILKNASKNSLIIVDELGRGTSTYDGFGLAWAIAEHIASKIGCFALFATHFHELTELSEKLPNVKNMHVVAHIEKNLKEQKHDDEDITLLYKVEPGISDQSFGIHVAEVVQFPEKIVKMAKRKANELDDLKTNNEDLKKAKLSLQEVNEGNIRLKALLKEWIRKVKEEGLHDPSKITEEASQHKIQELLRAIANEPEKENDNYLKYIKALLL

SEQ ID NO: 594 - protein, 964 aa, Saccharomyces cerevisiae
MSSTRPELKFSDVSEERNFYKKYTGLPKKPLKTIRLVDKGDYYTVIGSDAIFVADSVYHTQSVLKNCQLDPVTAKNFHEPTKYVTVSLQVLATLLKLCLLDLGYKVEIYDKGWKLIKSASPGNIEQVNELMNMNIDSSIIIASLKVQWNSQDGNCIIGVAFIDTTAYKVGMLDIVDNEVYSNLESFLIQLGVKECLVQDLTSNSNSNAEMQKVINVIDRCGCVVTLLKNSEFSEKDVELDLTKLLGDDLALSLPQKYSKLSMGACNALIGYLQLLSEQDQVGKYELVEHKLKEFMKLDASAIKALNLFPQGPQNPFGSNNLAVSGFTSAGNSGKVTSLFQLLNHCKTNAGVRLLNEWLKQPLTNIDEINKRHDLVDYLIDQIELRQMLTSEYLPMIPDIRRLTKKLNKRGNLEDVLKIYQFSKRIPEIVQVFTSFLEDDSPTEPVNELVRSVWLAPLSHHVEPLSKFEEMVETTVDLDAYEENNEFMIKVEFNEELGKIRSKLDTLRDEIHSIHLDSAEDLGFDPDKKLKLENHHLHGWCMRLTRNDAKELRKHKKYIELSTVKAGIFFSTKQLKSIANETNILQKEYDKQQSALVREIINITLTYTPVFEKRSLVLAHLDVIASFAHTSSYAPIPYIRPKLHPMDSERRTHLISSRHPVLEMQDDISFISNDVTLESGKGDFLIITGPNMGGKSTYIRQVGVISLMAQIGCFVPCEEAEIAIVDAILCRVGAGDSQLKGVSTFMVEILETASILKNASKNSLIIVDELGRGTSTYDGFGLAWAIAEHIASKIGCFALFATHFHELTELSEKLPNVKNMHVVAHIEKNLKEQKHDDEDITLLYKVEPGISDQSFGIHVAEVVQFPEKIVKMAKRKANELDDLKTNNEDLKKAKLSLQEVNEGNIRLKALLKEWIRKVKEEGLHDPSKITEEASQHKIQELLRAIANEPEKENDNYLKYIKALLL

SEQ ID NO: 595 - protein, 964 aa, Saccharomyces cerevisiae
MSSTRPELKFSDVSEERNFYKKYTGLPKKPLKTIRLVDKGDYYTVIGSDAIFVADSVYHTQSVLKNCQLDPVTAKNFHEPTKYVTVSLQVLATLLKLCLLDLGYKVEIYDKGWKLIKSASPGNIEQVNELMNMNIDSSIIIASLKVQWNSQDGNCIIGVAFIDTTAYKVGMLDIVDNEVYSNLESFLIQLGVKECLVQDLTSNSNSNAEMQKVINVIDRCGCVVTLLKNSEFSEKDVELDLTKLLGDDLALSLPQKYSKLSMGACNALIGYLQLLSEQDQVGKYELVEHKLKEFMKLDASAIKALNLFPQGPQNPFGSNNLAVSGFTSAGNSGKVTSLFQLLNHCKTNAGVRLLNEWLKQPLTNIDEINKRHDLVDYLIDQIELRQMLTSEYLPMIPDIRRLTKKLNKRGNLEDVLKIYQFSKRIPEIVQVFTSFLEDDSPTEPVNELVRSVWLAPLSHHVEPLSKFEEMVETTVDLDAYEENNEFMIKVEFNEELGKIRSKLDTLRDEIHSIHLDSAEDLGFDPDKKLKLENHHLHGWCMRLTRNDAKELRKHKKYIELSTVKAGIFFSTKQLKSIANETNILQKEYDKQQSALVREIINITLTYTPVFEKLSLVLAHLNVIASFAHTSSYAPIPYIRPKLHPMDSERRTHLISSRHPVLEMQDDISFISNDVTLESGKGDFLIITGPNMGGKSTYIRQVGVISLMAQIGCFVPCEEAEIAIVDAILCRVGAGDSQLKGVSTFMVEILETASILKNASKNSLIIVDELGRGTSTYDGFGLAWAIAEHIASKIGCFALFATHFHELTELSEKLPNVKNMHVVAHIEKNLKEQKHDDEDITLLYKVEPGISDQSFGIHVAEVVQFPEKIVKMAKRKANELDDLKTNNEDLKKAKLSLQEVNEGNIRLKALLKEWIRKVKEEGLHDPSKITEEASQHKIQELLRAIANEPEKENDNYLKYIKALLL

SEQ ID NO: 596 - protein, 964 aa, Saccharomyces cerevisiae
MSSTRPELKFSDVSEERNFYKKYTGLPKKPLKTIRLVDKGDYYTVIGSDAIFVADSVYHTQSVLKNCQLDPVTAKNFHEPTKYVTVSLQVLATLLKLCLLDLGYKVEIYDKGWKLIKSASPGNIEQVNELMNMNIDSSIIIASLKVQWNSQDGNCIIGVAFIDTTAYKVGMLDIVDNEVYSNLESFLIQLGVKECLVQDLTSNSNSNAEMQKVINVIDRCGCVVTLLKNSEFSEKDVELDLTKLLGDDLALSLPQKYSKLSMGACNALIGYLQLLSEQDQVGKYELVEHKLKEFMKLDASAIKALNLFPQGPQNPFGSNNLAVSGFTSAGNSGKVTSLFQLLNHCKTNAGVRLLNEWLKQPLTNIDEINKRHDLVDYLIDQIELRQMLTSEYLPMIPDIRRLTKKLNKRGNLEDVLKIYQFSKRIPEIVQVFTSFLEDDSPTEPVNELVRSVWLAPLSHHVEPLSKFEEMVETTVDLDAYEENNEFMIKVEFNEELGKIRSKLDTLRDEIHSIHLDSAEDLGFDPDKKLKLENHHLHGWCMRLTRNDAKELRKHKKYIELSTVKAGIFFSTKQLKSIANETNILQKEYDKQQSALVREIINITLTYTPVFEKLSLVLAHLDVIASFAHTSSYAPIPYIRTKLHPMDSERRTHLISSRHPVLEMQDDISFISNDVTLESGKGDFLIITGPNMGGKSTYIRQVGVISLMAQIGCFVPCEEAEIAIVDAILCRVGAGDSQLKGVSTFMVEILETASILKNASKNSLIIVDELGRGTSTYDGFGLAWAIAEHIASKIGCFALFATHFHELTELSEKLPNVKNMHVVAHIEKNLKEQKHDDEDITLLYKVEPGISDQSFGIHVAEVVQFPEKIVKMAKRKANELDDLKTNNEDLKKAKLSLQEVNEGNIRLKALLKEWIRKVKEEGLHDPSKITEEASQHKIQELLRAIANEPEKENDNYLKYIKALLL

SEQ ID NO: 597 - protein, 964 aa, Saccharomyces cerevisiae
MSSTRPELKFSDVSEERNFYKKYTGLPKKPLKTIRLVDKGDYYTVIGSDAIFVADSVYHTQSVLKNCQLDPVTAKNFHEPTKYVTVSLQVLATLLKLCLLDLGYKVEIYDKGWKLIKSASPGNIEQVNELMNMNIDSSIIIASLKVQWNSQDGNCIIGVAFIDTTAYKVGMLDIVDNEVYSNLESFLIQLGVKECLVQDLTSNSNSNAEMQKVINVIDRCGCVVTLLKNSEFSEKDVELDLTKLLGDDLALSLPQKYSKLSMGACNALIGYLQLLSEQDQVGKYELVEHKLKEFMKLDASAIKALNLFPQGPQNPFGSNNLAVSGFTSAGNSGKVTSLFQLLNHCKTNAGVRLLNEWLKQPLTNIDEINKRHDLVDYLIDQIELRQMLTSEYLPMIPDIRRLTKKLNKRGNLEDVLKIYQFSKRIPEIVQVFTSFLEDDSPTEPVNELVRSVWLAPLSHHVEPLSKFEEMVETTVDLDAYEENNEFMIKVEFNEELGKIRSKLDTLRDEIHSIHLDSAEDLGFDPDKKLKLENHHLHGWCMRLTRNDAKELRKHKKYIELSTVKAGIFFSTKQLKSIANETNILQKEYDKQQSALVREIINITLTYTPVFEKLSLVLAHLDVIASFAHTSSYAPIPYIRPKLHPMDSERRTHLISSRHPVLEMQDDISFISNDVTLESGKGDFLIITGPNMGGKSTYIRQVGVISLMAQIGCFVPCEEAEIAIVDAILCRVGAGDSQLKGISTFMVEILETASILKNASKNSLIIVDELGRGTSTYDGFGLAWAIAEHIASKIGCFALFATHFHELTELSEKLPNVKNMHVVAHIEKNLKEQKHDDEDITLLYKVEPGISDQSFGIHVAEVVQFPEKIVKMAKRKANELDDLKTNNEDLKKAKLSLQEVNEGNIRLKALLKEWIRKVKEEGLHDPSKITEEASQHKIQELLRAIANEPEKENDNYLKYIKALLL

SEQ ID NO: 598 - protein, 756 aa, Homo sapiens
MSFVAGVIRRLDETVVNRIAAAEVIQRPANAIKEMIENCLDAKSTSIQVIVKEGGLKLIQIQDNGTGIRKEDLDIVCERFTTSKLQSFEDLASISTYGFRGEALASISHVAHVTITTKTADGKCAYRASYSDGKLKAPPKPCAGNQGTQITVEDLFYNIATRRKALKNPSEEYGKILEVVGRYSVHNAGISFSVKKQGETVADVRTLPNASTVDNIRSVFGNAVSRELIEIGCEDKTLAFKMNGYISNANYSVKKCIFLLFINHRLVESTSLRKAIETVYAAYLPKNTHPFLYLSLEISPQNVDVNVHPTKHEVHFLHEESILERVQQHIESKLLGSNSSRMYFTQTLLPGLAGPSGEMVKSTTSLTSSSTSGSSDKVYAHQMVRTDSREQKLDAFLQPLSKPLSSQPQAIVTEDKTDISSGRARQQDEEMLELPAPAEVAAKNQSLEGDTTKGTSEMSEKRGPTSSNPRKRHREDSDVEMVEDDSRKEMTAACTPRRRIINLTSVLSLQEEINEQGHEVLREMLHNHSFVGCVNPQWALAQHQTKLYLLNTTKLSEELFYQILIYDFANFGVLRLSEPAPLFDLAMLALDSPESGWTEEDGPKEGLAEYIVEFLKKKAEMLADYFSLEIDEEGNLIGLPLLIDNYVPPLEGLPIFILRLATEVNWDEEKECFESLSKECAMFYSIRKQYISEESTLSGQQSEVPGSIPNSWKWTVEHIVYKALRSHILPPKHFTEDGNILQLANLPDLYKVFERC

SEQ ID NO: 599 - protein, 756 aa, Homo sapiens
MSFVAGVIRRLDETVVNRIAAGEVIQRPANAIKEMIENCLDAKSTSIQVIVKEGGLKLIQIQDNGTGIRKEDLDIVCERFTTSKLQSFEDLASISTYGFRGEALASISHVAHVTITTKTADGKCAYRASYSDGKLKAPPKRCAGNQGTQITVEDLFYNIATRRKALKNPSEEYGKILEVVGRYSVHNAGISFSVKKQGETVADVRTLPNASTVDNIRSVFGNAVSRELIEIGCEDKTLAFKMNGYISNANYSVKKCIFLLFINHRLVESTSLRKAIETVYAAYLPKNTHPFLYLSLEISPQNVDVNVHPTKHEVHFLHEESILERVQQHIESKLLGSNSSRMYFTQTLLPGLAGPSGEMVKSTTSLTSSSTSGSSDKVYAHQMVRTDSREQKLDAFLQPLSKPLSSQPQAIVTEDKTDISSGRARQQDEEMLELPAPAEVAAKNQSLEGDTTKGTSEMSEKRGPTSSNPRKRHREDSDVEMVEDDSRKEMTAACTPRRRIINLTSVLSLQEEINEQGHEVLREMLHNHSFVGCVNPQWALAQHQTKLYLLNTTKLSEELFYQILIYDFANFGVLRLSEPAPLFDLAMLALDSPESGWTEEDGPKEGLAEYIVEFLKKKAEMLADYFSLEIDEEGNLIGLPLLIDNYVPPLEGLPIFILRLATEVNWDEEKECFESLSKECAMFYSIRKQYISEESTLSGQQSEVPGSIPNSWKWTVEHIVYKALRSHILPPKHFTEDGNILQLANLPDLYKVFERC

SEQ ID NO: 600 - protein, 756 aa, Homo sapiens
MSFVAGVIRRLDETVVNRIAAGEVIQRPANAIKEMIENCLDAKSTSIQVIVKEGGLKLIQIQDNGTGIRKEDLDIVCERFTTSKLQSFEDLASISTYGFRGEALASISHVAHVTITTKTADGKCAYRASYSDGKLKAPPKPCAGNQGTQITVEDLFYNIATRRKALKNPSEEYGKILEVVGRYSVHNAGISFSVKKQGETVADVRTLPNASTVDNIRSVFGNAVSRELIEIGCEDKTLAFKMNGYISNANYSVKKCIFLLFINHRLVESTSLRKAIETVYAAYLPQNTHPFLYLSLEISPQNVDVNVHPTKHEVHFLHEESILERVQQHIESKLLGSNSSRMYFTQTLLPGLAGPSGEMVKSTTSLTSSSTSGSSDKVYAHQMVRTDSREQKLDAFLQPLSKPLSSQPQAIVTEDKTDISSGRARQQDEEMLELPAPAEVAAKNQSLEGDTTKGTSEMSEKRGPTSSNPRKRHREDSDVEMVEDDSRKEMTAACTPRRRIINLTSVLSLQEEINEQGHEVLREMLHNHSFVGCVNPQWALAQHQTKLYLLNTTKLSEELFYQILIYDFANFGVLRLSEPAPLFDLAMLALDSPESGWTEEDGPKEGLAEYIVEFLKKKAEMLADYFSLEIDEEGNLIGLPLLIDNYVPPLEGLPIFILRLATEVNWDEEKECFESLSKECAMFYSIRKQYISEESTLSGQQSEVPGSIPNSWKWTVEHIVYKALRSHILPPKHFTEDGNILQLANLPDLYKVFERC

SEQ ID NO: 601 - protein, 756 aa, Homo sapiens
MSFVAGVIRRLDETVVNRIAAGEVIQRPANAIKEMIENCLDAKSTSIQVIVKEGGLKLIQIQDNGTGIRKEDLDIVCERFTTSKLQSFEDLASISTYGFRGEALASISHVAHVTITTKTADGKCAYRASYSDGKLKAPPKPCAGNQGTQITVEDLFYNIATRRKALKNPSEEYGKILEVVGRYSVHNAGISFSVKKQGETVADVRTLPNASTVDNIRSVFGNAVSRELIEIGCEDKTLAFKMNGYISNANYSVKKCIFLLFINHRLVESTSLRKAIETVYAAYLPKNTHPFLYLSLEISPQNVVVNVHPTKHEVHFLHEESILERVQQHIESKLLGSNSSRMYFTQTLLPGLAGPSGEMVKSTTSLTSSSTSGSSDKVYAHQMVRTDSREQKLDAFLQPLSKPLSSQPQAIVTEDKTDISSGRARQQDEEMLELPAPAEVAAKNQSLEGDTTKGTSEMSEKRGPTSSNPRKRHREDSDVEMVEDDSRKEMTAACTPRRRIINLTSVLSLQEEINEQGHEVLREMLHNHSFVGCVNPQWALAQHQTKLYLLNTTKLSEELFYQILIYDFANFGVLRLSEPAPLFDLAMLALDSPESGWTEEDGPKEGLAEYIVEFLKKKAEMLADYFSLEIDEEGNLIGLPLLIDNYVPPLEGLPIFILRLATEVNWDEEKECFESLSKECAMFYSIRKQYISEESTLSGQQSEVPGSIPNSWKWTVEHIVYKALRSHILPPKHFTEDGNILQLANLPDLYKVFERC

SEQ ID NO: 602 - protein, 756 aa, Homo sapiens
MSFVAGVIRRLDETVVNRIAAGEVIQRPANAIKEMIENCLDAKSTSIQVIVKEGGLKLIQIQDNGTGIRKEDLDIVCERFTTSKLQSFEDLASISTYGFRGEALASISHVAHVTITTKTADGKCAYRASYSDGKLKAPPKPCAGNQGTQITVEDLFYNIATRRKALKNPSEEYGKILEVVGRYSVHNAGISFSVKKQGETVADVRTLPNASTVDNIRSVFGNAVSRELIEIGCEDKTLAFKMNGYISNANYSVKKCIFLLFINHRLVESTSLRKAIETVYAAYLPKNTHPFLYLSLEISPQNVDVNVHPTKHEVHFLHEESILERVQQHIESKLLGSNSSRMYFTQTLLPGLAGPSGEMVKSTTSLTSSSTSGSSDKVYAHQMVRTDSREQKLDAFLQPLSKPLSSQPQAIVTEDKTDISSGRARQQDEEMLELPAPAEVAAKNQSLEGDTTKGTSEMSEKRGPTSSNPRKRHREDSDVEMVEDDSRKEMTAACTPRRRIINLTSVLSLQEEINEQGHEVLREMLHNHSFVGCVNPQWALAQHQTKLYLLNTTKLSEELFYQILIYDFANFGVLRLSEPAPLFDLAMLALDSPESGWTEEDGPKEGLAEYIVEFLKKKAEMLADYFSLEIDEEGNLIGLSLLIDNYVPPLEGLPIFILRLATEVNWDEEKECFESLSKECAMFYSIRKQYISEESTLSGQQSEVPGSIPNSWKWTVEHIVYKALRSHILPPKHFTEDGNILQLANLPDLYKVFERC

SEQ ID NO: 603 - protein, 934 aa, Homo sapiens
MAVQPKETLQLESAAEVGFVRFFQGMPEKLTTTVRLFDRGDFYTAHGEDALLAAREVFKTQGVIKYMGPAGAKNLQSVVLSKMNFESFVKDLLLVRQYRVEVYKNRAGNKASKENDWYLAYKASPGNLSQFEDILFGNNDMSASIGVVGVKMSAVDGQRQVGVGYVDSIQRKLGLCEFPDNDQFSNLEALLIQIGPKECVLPGGETAGDMGKLRQIIQRGGILITERKKADFSTKDIYQDLNRLLKGKKGEQMNSAVLPEMENQVAVSSLSAVIKFLELLSDDSNFGQFELTTFDFSQYMKLDIAAVRALNLFQGSVEDTTGSQSLAALLNKCKTPQGQRLVNQWIKQPLMDKNRIEERLNLVEAFVEDAELRQTLQEDLLRRFPDLNRLAKKFQRQAANLQDCYRLYQGINQLPNVIQALEKHEGKHQKLLLAVFVTPLTDLRSDFSKFQEMIETTLDMDQVENHEFLVKPSFDPNLSELREIMNDLEKKMQSTLISAARDLGLDPGKQIKLDSSAQFGYYFRVTCKEEKVLRNNKNFSTVDIQKNGVKFTNSKLTSLNEEYTKNKTEYEEAQDAIVKEIVNISSGYVEPMQTLNDVLAQLDAVVSFAHVSNGAPVPYVRPAILEKGQGRIILKASRHACVEVQDEIAFIPNDVYFEKDKQMFHIITGPNMGGKSTYIRQTGVIVLMAQIGCFVPCESAEVSIVDCILARVGAGDSQLKGVSTFMAEMLETASILRSATKDSLIIIDELGRGTSTYDGFGLAWAISEYIATKIGAFCMFATHFHELTALANQIPTVNNLHVTALTTEETLTMLYQVKKGVCDQSFGIHVAELANFPKHVIECAKQKALELEEFQYIGESQGYDIMEPAAKKCYLEREQGEKIIQEFLSKVKQMPFTEMSEENITIKLKQLKAEVIAKNNSFVNEIISRIKVTT

SEQ ID NO: 604 - protein, 932 aa, Homo sapiens
MAVQPKETLQLESAAEVGFVRFFQGMPEKPTTTVRLFDRGDFYTAHGEDALLAAREVFKTQGVIKYMGPAGAKNLQSVVLSKMNFESFVKDLLLVRQYRVYKNRAGNKASKENDWYLAYKASPGNLSQFEDILFGNNDMSASIGVVGVKMSAVDGQRQVGVGYVDSIQRKLGLCEFPDNDQFSNLEALLIQIGPKECVLPGGETAGDMGKLRQIIQRGGILITERKKADFSTKDIYQDLNRLLKGKKGEQMNSAVLPEMENQVAVSSLSAVIKFLELLSDDSNFGQFELTTFDFSQYMKLDIAAVRALNLFQGSVEDTTGSQSLAALLNKCKTPQGQRLVNQWIKQPLMDKNRIEERLNLVEAFVEDAELRQTLQEDLLRRFPDLNRLAKKFQRQAANLQDCYRLYQGINQLPNVIQALEKHEGKHQKLLLAVFVTPLTDLRSDFSKFQEMIETTLDMDQVENHEFLVKPSFDPNLSELREIMNDLEKKMQSTLISAARDLGLDPGKQIKLDSSAQFGYYFRVTCKEEKVLRNNKNFSTVDIQKNGVKFTNSKLTSLNEEYTKNKTEYEEAQDAIVKEIVNISSGYVEPMQTLNDVLAQLDAVVSFAHVSNGAPVPYVRPAILEKGQGRIILKASRHACVEVQDEIAFIPNDVYFEKDKQMFHIITGPNMGGKSTYIRQTGVIVLMAQIGCFVPCESAEVSIVDCILARVGAGDSQLKGVSTFMAEMLETASILRSATKDSLIIIDELGRGTSTYDGFGLAWAISEYIATKIGAFCMFATHFHELTALANQIPTVNNLHVTALTTEETLTMLYQVKKGVCDQSFGIHVAELANFPKHVIECAKQKALELEEFQYIGESQGYDIMEPAAKKCYLEREQGEKIIQEFLSKVKQMPFTEMSEENITIKLKQLKAEVIAKNNSFVNEIISRIKVTT

SEQ ID NO: 605 - protein, 934 aa, Homo sapiens [sequence omitted]

SEQ ID NO: 606 - protein, 934 aa, Homo sapiens
MAVQPKETLQLESAAEVGFVRFFQGMPEKPTTTVRLFDRGDFYTAHGEDALLAAREVFKTQGVIKYMGPAGAKNLQSVVLSKMNFESFVKDLLLVRQYRVEVYKNRAGNKASKENDWYLAYKASPGNLSQFEDILFGNNDMSASIGVVGVKMSAVDGQRQVGVGYVDSIQRKLGLCEFPDNDQFSNLEALLIQIGPKECVLPGGETAGDMGKLRQIIQRGGILITERKKADFSTKDIYQDLNRLLKGKKGEQMNSAVLPEMENQVAVSSLSAVIKFLELLSDDSNFGQFELTTFDFSQYMKLDIAAVRALNLFQGSVEDTTVSQSLAALLNKCKTPQGQRLVNQWIKQPLMDKNRIEERLNLVEAFVEDAELRQTLQEDLLRRFPDLNRLAKKFQRQAANLQDCYRLYQGINQLPNVIQALEKHEGKHQKLLLAVFVTPLTDLRSDFSKFQEMIETTLDMDQVENHEFLVKPSFDPNLSELREIMNDLEKKMQSTLISAARDLGLDPGKQIKLDSSAQFGYYFRVTCKEEKVLRNNKNFSTVDIQKNGVKFTNSKLTSLNEEYTKNKTEYEEAQDAIVKEIVNISSGYVEPMQTLNDVLAQLDAVVSFAHVSNGAPVPYVRPAILEKGQGRIILKASRHACVEVQDEIAFIPNDVYFEKDKQMFHIITGPNMGGKSTYIRQTGVIVLMAQIGCFVPCESAEVSIVDCILARVGAGDSQLKGVSTFMAEMLETASILRSATKDSLIIIDELGRGTSTYDGFGLAWAISEYIATKIGAFCMFATHFHELTALANQIPTVNNLHVTALTTEETLTMLYQVKKGVCDQSFGIHVAELANFPKHVIECAKQKALELEEFQYIGESQGYDIMEPAAKKCYLEREQGEKIIQEFLSKVKQMPFTEMSEENITIKLKQLKAEVIAKNNSFVNEIISRIKVTT

SEQ ID NO: 607 - protein, 934 aa, Homo sapiens [sequence omitted]

SEQ ID NO: 608 - protein, 934 aa, Homo sapiens [sequence omitted]

SEQ ID NO: 609 - protein, 933 aa, Homo sapiens
MAVQPKETLQLESAAEVGFVRFFQGMPEKPTTTVRLFDRGDFYTAHGEDALLAAREVFKTQGVIKYMGPAGAKNLQSVVLSKMNFESFVKDLLLVRQYRVEVYKNRAGNKASKENDWYLAYKASPGNLSQFEDILFGNNDMSASIGVVGVKMSAVDGQRQVGVGYVDSIQRKLGLCEFPDNDQFSNLEALLIQIGPKECVLPGGETAGDMGKLRQIIQRGGILITERKKADFSTKDIYQDLNRLLKGKKGEQMNSAVLPEMENQVAVSSLSAVIKFLELLSDDSNFGQFELTTFDFSQYMKLDIAAVRALNLFQGSVEDTTGSQSLAALLNKCKTPQGQRLVNQWIKQPLMDKNRIEERLNLVEAFVEDAELRQTLQEDLLRRFPDLNRLAKKFQRQAANLQDCYRLYQGINQLPNVIQALEKHEGKHQKLLLAVFVTLTDLRSDFSKFQEMIETTLDMDQVENHEFLVKPSFDPNLSELREIMNDLEKKMQSTLISAARDLGLDPGKQIKLDSSAQFGYYFRVTCKEEKVLRNNKNFSTVDIQKNGVKFTNSKLTSLNEEYTKNKTEYEEAQDAIVKEIVNISSGYVEPMQTLNDVLAQLDAVVSFAHVSNGAPVPYVRPAILEKGQGRIILKASRHACVEVQDEIAFIPNDVYFEKDKQMFHIITGPNMGGKSTYIRQTGVIVLMAQIGCFVPCESAEVSIVDCILARVGAGDSQLKGVSTFMAEMLETASILRSATKDSLIIIDELGRGTSTYDGFGLAWAISEYIATKIGAFCMFATHFHELTALANQIPTVNNLHVTALTTEETLTMLYQVKKGVCDQSFGIHVAELANFPKHVIECAKQKALELEEFQYIGESQGYDIMEPAAKKCYLEREQGEKIIQEFLSKVKQMPFTEMSEENITIKLKQLKAEVIAKNNSFVNEIISRIKVTT

SEQ ID NO: 610 - protein, 934 aa, Homo sapiens [sequence omitted]

SEQ ID NO: 611 - protein, 934 aa, Homo sapiens
MAVQPKETLQLESAAEVGFVRFFQGMPEKPTTTVRLFDRGDFYTAHGEDALLAAREVFKTQGVIKYMGPAGAKNLQSVVLSKMNFESFVKDLLLVRQYRVEVYKNRAGNKASKENDWYLAYKASPGNLSQFEDILFGNNDMSASIGVVGVKMSAVDGQRQVGVGYVDSIQRKLGLCEFPDNDQFSNLEALLIQIGPKECVLPGGETAGDMGKLRQIIQRGGILITERKKADFSTKDIYQDLNRLLKGKKGEQMNSAVLPEMENQVAVSSLSAVIKFLELLSDDSNFGQFELTTFDFSQYMKLDIAAVRALNLFQGSVEDTTGSQSLAALLNKCKTPQGQRLVNQWIKQPLMDKNRIEERLNLVEAFVEDAELRQTLQEDLLRRFPDLNRLAKKFQRQAANLQDCYRLYQGINQLPNVIQALEKHEGKHQKLLLAVFVTPLTDLRSDFSKFQEMIETTLDMDQVENHEFLVKPSFDPNLSELREIMNDLEKKMQSTLISAARDLGLDPGKQIKLDSSAQFGYYFRVTCKEEKVLCNNKNFSTVDIQKNGVKFTNSKLTSLNEEYTKNKTEYEEAQDAIVKEIVNISSGYVEPMQTLNDVLAQLDAVVSFAHVSNGAPVPYVRPAILEKGQGRIILKASRHACVEVQDEIAFIPNDVYFEKDKQMFHIITGPNMGGKSTYIRQTGVIVLMAQIGCFVPCESAEVSIVDCILARVGAGDSQLKGVSTFMAEMLETASILRSATKDSLIIIDELGRGTSTYDGFGLAWAISEYIATKIGAFCMFATHFHELTALANQIPTVNNLHVTALTTEETLTMLYQVKKGVCDQSFGIHVAELANFPKHVIECAKQKALELEEFQYIGESQGYDIMEPAAKKCYLEREQGEKIIQEFLSKVKQMPFTEMSEENITIKLKQLKAEVIAKNNSFVNEIISRIKVTT

SEQ ID NO: 612 - protein, 934 aa, Homo sapiens
MAVQPKETLQLESAAEVGFVRFFQGMPEKPTTTVRLFDRGDFYTAHGEDALLAAREVFKTQGVIKYMGPAGAKNLQSVVLSKMNFESFVKDLLLVRQYRVEVYKNRAGNKASKENDWYLAYKASPGNLSQFEDILFGNNDMSASIGVVGVKMSAVDGQRQVGVGYVDSIQRKLGLCEFPDNDQFSNLEALLIQIGPKECVLPGGETAGDMGKLRQIIQRGGILITERKKADFSTKDIYQDLNRLLKGKKGEQMNSAVLPEMENQVAVSSLSAVIKFLELLSDDSNFGQFELTTFDFSQYMKLDIAAVRALNLFQGSVEDTTGSQSLAALLNKCKTPQGQRLVNQWIKQPLMDKNRIEERLNLVEAFVEDAELRQTLQEDLLRRFPDLNRLAKKFQRQAANLQDCYRLYQGINQLPNVIQALEKHEGKHQKLLLAVFVTPLTDLRSDFSKFQEMIETTLDMDQVENHEFLVKPSFDPNLSELREIMNDLEKKMQSTLISAARDLGLDPGKQIKLDSSAQFGYYFRVTCKEEKVLRNNKNFSTVDIQKNGVKFTNSKLTSLNEVYTKNKTEYEEAQDAIVKEIVNISSGYVEPMQTLNDVLAQLDAVVSFAHVSNGAPVPYVRPAILEKGQGRIILKASRHACVEVQDEIAFIPNDVYFEKDKQMFHIITGPNMGGKSTYIRQTGVIVLMAQIGCFVPCESAEVSIVDCILARVGAGDSQLKGVSTFMAEMLETASILRSATKDSLIIIDELGRGTSTYDGFGLAWAISEYIATKIGAFCMFATHFHELTALANQIPTVNNLHVTALTTEETLTMLYQVKKGVCDQSFGIHVAELANFPKHVIECAKQKALELEEFQYIGESQGYDIMEPAAKKCYLEREQGEKIIQEFLSKVKQMPFTEMSEENITIKLKQLKAEVIAKNNSFVNEIISRIKVTT

SEQ ID NO: 613 - protein, 934 aa, Homo sapiens
MAVQPKETLQLESAAEVGFVRFFQGMPEKPTTTVRLFDRGDFYTAHGEDALLAAREVFKTQGVIKYMGPAGAKNLQSVVLSKMNFESFVKDLLLVRQYRVEVYKNRAGNKASKENDWYLAYKASPGNLSQFEDILFGNNDMSASIGVVGVKMSAVDGQRQVGVGYVDSIQRKLGLCEFPDNDQFSNLEALLIQIGPKECVLPGGETAGDMGKLRQIIQRGGILITERKKADFSTKDIYQDLNRLLKGKKGEQMNSAVLPEMENQVAVSSLSAVIKFLELLSDDSNFGQFELTTFDFSQYMKLDIAAVRALNLFQGSVEDTTGSQSLAALLNKCKTPQGQRLVNQWIKQPLMDKNRIEERLNLVEAFVEDAELRQTLQEDLLRRFPDLNRLAKKFQRQAANLQDCYRLYQGINQLPNVIQALEKHEGKHQKLLLAVFVTPLTDLRSDFSKFQEMIETTLDMDQVENHEFLVKPSFDPNLSELREIMNDLEKKMQSTLISAARDLGLDPGKQIKLDSSAQFGYYFRVTCKEEKVLRNNKNFSTVDIQKNGVKFTNSKLTSLNEEYTKNKTEYEEAQDAIVKEIVSISSGYVEPMQTLNDVLAQLDAVVSFAHVSNGAPVPYVRPAILEKGQGRIILKASRHACVEVQDEIAFIPNDVYFEKDKQMFHIITGPNMGGKSTYIRQTGVIVLMAQIGCFVPCESAEVSIVDCILARVGAGDSQLKGVSTFMAEMLETASILRSATKDSLIIIDELGRGTSTYDGFGLAWAISEYIATKIGAFCMFATHFHELTALANQIPTVNNLHVTALTTEETLTMLYQVKKGVCDQSFGIHVAELANFPKHVIECAKQKALELEEFQYIGESQGYDIMEPAAKKCYLEREQGEKIIQEFLSKVKQMPFTEMSEENITIKLKQLKAEVIAKNNSFVNEIISRIKVTT

SEQ ID NO: 614 - protein, 934 aa, Homo sapiens [sequence omitted]

SEQ ID NO: 615 - protein, 934 aa, Homo sapiens
MAVQPKETLQLESAAEVGFVRFFQGMPEKPTTTVRLFDRGDFYTAHGEDALLAAREVFKTQGVIKYMGPAGAKNLQSVVLSKMNFESFVKDLLLVRQYRVEVYKNRAGNKASKENDWYLAYKASPGNLSQFEDILFGNNDMSASIGVVGVKMSAVDGQRQVGVGYVDSIQRKLGLCEFPDNDQFSNLEALLIQIGPKECVLPGGETAGDMGKLRQIIQRGGILITERKKADFSTKDIYQDLNRLLKGKKGEQMNSAVLPEMENQVAVSSLSAVIKFLELLSDDSNFGQFELTTFDFSQYMKLDIAAVRALNLFQGSVEDTTGSQSLAALLNKCKTPQGQRLVNQWIKQPLMDKNRIEERLNLVEAFVEDAELRQTLQEDLLRRFPDLNRLAKKFQRQAANLQDCYRLYQGINQLPNVIQALEKHEGKHQKLLLAVFVTPLTDLRSDFSKFQEMIETTLDMDQVENHEFLVKPSFDPNLSELREIMNDLEKKMQSTLISAARDLGLDPGKQIKLDSSAQFGYYFRVTCKEEKVLRNNKNFSTVDIQKNGVKFTNSKLTSLNEEYTKNKTEYEEAQDAIVKEIVNISSGYVEPMQTLNDVLAQLNAVVSFAHVSNGAPVPYVRPAILEKGQGRIILKASRHACVEVQDEIAFIPNDVYFEKDKQMFHIITGPNMGGKSTYIRQTGVIVLMAQIGCFVPCESAEVSIVDCILARVGAGDSQLKGVSTFMAEMLETASILRSATKDSLIIIDELGRGTSTYDGFGLAWAISEYIATKIGAFCMFATHFHELTALANQIPTVNNLHVTALTTEETLTMLYQVKKGVCDQSFGIHVAELANFPKHVIECAKQKALELEEFQYIGESQGYDIMEPAAKKCYLEREQGEKIIQEFLSKVKQMPFTEMSEENITIKLKQLKAEVIAKNNSFVNEIISRIKVTT

SEQ ID NO: 616 - protein, 934 aa, Homo sapiens [sequence omitted]

SEQ ID NO: 617 - protein, 934 aa, Homo sapiens
MAVQPKETLQLESAAEVGFVRFFQGMPEKPTTTVRLFDRGDFYTAHGEDALLAAREVFKTQGVIKYMGPAGAKNLQSVVLSKMNFESFVKDLLLVRQYRVEVYKNRAGNKASKENDWYLAYKASPGNLSQFEDILFGNNDMSASIGVVGVKMSAVDGQRQVGVGYVDSIQRKLGLCEFPDNDQFSNLEALLIQIGPKECVLPGGETAGDMGKLRQIIQRGGILITERKKADFSTKDIYQDLNRLLKGKKGEQMNSAVLPEMENQVAVSSLSAVIKFLELLSDDSNFGQFELTTFDFSQYMKLDIAAVRALNLFQGSVEDTTGSQSLAALLNKCKTPQGQRLVNQWIKQPLMDKNRIEERLNLVEAFVEDAELRQTLQEDLLRRFPDLNRLAKKFQRQAANLQDCYRLYQGINQLPNVIQALEKHEGKHQKLLLAVFVTPLTDLRSDFSKFQEMIETTLDMDQVENHEFLVKPSFDPNLSELREIMNDLEKKMQSTLISAARDLGLDPGKQIKLDSSAQFGYYFRVTCKEEKVLRNNKNFSTVDIQKNGVKFTNSKLTSLNEEYTKNKTEYEEAQDAIVKEIVNISSGYVEPMQTLNDVLAQLDAVVSFAHVSNGAPVPYVRPAILEKGQGRIILKASRHACVEVQDEIAFIPNDVYFEKDKQMFHIITGPNMGGKSTYIRQTGVIVLMAQIGCFVPCESAEVSIVDCILARVGAGDSQLKGISTFMAEMLETASILRSATKDSLIIIDELGRGTSTYDGFGLAWAISEYIATKIGAFCMFATHFHELTALANQIPTVNNLHVTALTTEETLTMLYQVKKGVCDQSFGIHVAELANFPKHVIECAKQKALELEEFQYIGESQGYDIMEPAAKKCYLEREQGEKIIQEFLSKVKQMPFTEMSEENITIKLKQLKAEVIAKNNSFVNEIISRIKVTT

SEQ ID NO: 618 - DNA, 1716 bp, Saccharomyces cerevisiae
atggattctagaacagttggtatattaggagggggacaattgggacgtatgattgttgaggcagcaaacaggctcaacattaagacggtaatactagatgctgaaaattctcctgccaaacaaataagcaactccaatgaccacgttaatggctccttttccaatcctcttgatatcgaaaaactagctgaaaaatgtgatgtgctaacgattgagattgagcatgttgatgttcctacactaaagaatcttcaagtaaaacatcccaaattaaaaatttacccttctccagaaacaatcagattgatacaagacaaatatattcaaaaagagcatttaatcaaaaatggtatagcagttacccaaagtgttcctgtggaacaagccagtgagacgtccctattgaatgttggaagagatttgggttttccattcgtcttgaagtcgaggactttggcatacgatggaagaggtaacttcgttgtaaagaataaggaaatgattccggaagctttggaagtactgaaggatcgtcctttgtacgccgaaaaatgggcaccatttactaaagaattagcagtcatgattgtgagatctgttaacggtttagtgttttcttacccaattgtagagactatccacaaggacaatatttgtgacttatgttatgcgcctgctagagttccggactccgttcaacttaaggcgaagttgttggcagaaaatgcaatcaaatcttttcccggttgtggtatatttggtgtggaaatgttctatttagaaacaggggaattgcttattaacgaaattgccccaaggcctcacaactctggacattataccattgatgcttgcgtcacttctcaatttgaagctcatttgagatcaatattggatttgccaatgccaaagaatttcacatctttctccaccattacaacgaacgccattatgctaaatgttcttggagacaaacatacaaaagataaagagctagaaacttgcgaaagagcattggcgactccaggttcctcagtgtacttatatggaaaagagtctagacctaacagaaaagtaggtcacataaatattattgcctccagtatggcggaatgtgaacaaaggctgaactacattacaggtagaactgatattccaatcaaaatctctgtcgctcaaaagttggacttggaagcaatggtcaaaccattggttggaatcatcatgggatcagactctgacttgccggtaatgtctgccgcatgtgcggttttaaaagattttggcgttccatttgaagtgacaatagtctctgctcatagaactccacataggatgtcagcatatgctatttccgcaagcaagcgtggaattaaaacaattatcgctggagctggtggggctgctcacttgccaggtatggtggctgcaatgacaccacttcctgtcatcggtgtgcccgtaaaaggttcttgtctagatggagtagattctttacattcaattgtgcaaatgcctagaggtgttccagtagctaccgtcgctattaataatagtacgaacgctgcgctgttggctgtcagactgcttggcgcttatgattcaagttatacaacgaaaatggaacagtttttattaaagcaagaagaagaagttcttgtcaaagcacaaaagttagaaactgtcggttacgaagcttatctagaaaacaagtaa

SEQ ID NO: 619 - DNA, 1773 bp, Artificial sequence
  Saccharomyces cerevisaie ADE2 gene containing the MS3 microsatell ite (AC)19A(G)18 between codons 1 and 2
atgacacacacacacacacacacacacacacacacacacacagggggggggggggggggggattctagaacagttggtatattaggagggggacaattgggacgtatgattgttgaggcagcaaacaggctcaacattaagacggtaatactagatgctgaaaattctcctgccaaacaaataagcaactccaatgaccacgttaatggctccttttccaatcctcttgatatcgaaaaactagctgaaaaatgtgatgtgctaacgattgagattgagcatgttgatgttcctacactaaagaatcttcaagtaaaacatcccaaattaaaaatttacccttctccagaaacaatcagattgatacaagacaaatatattcaaaaagagcatttaatcaaaaatggtatagcagttacccaaagtgttcctgtggaacaagccagtgagacgtccctattgaatgttggaagagatttgggttttccattcgtcttgaagtcgaggactttggcatacgatggaagaggtaacttcgttgtaaagaataaggaaatgattccggaagctttggaagtactgaaggatcgtcctttgtacgccgaaaaatgggcaccatttactaaagaattagcagtcatgattgtgagatctgttaacggtttagtgttttcttacccaattgtagagactatccacaaggacaatatttgtgacttatgttatgcgcctgctagagttccggactccgttcaacttaaggcgaagttgttggcagaaaatgcaatcaaatcttttcccggttgtggtatatttggtgtggaaatgttctatttagaaacaggggaattgcttattaacgaaattgccccaaggcctcacaactctggacattataccattgatgcttgcgtcacttctcaatttgaagctcatttgagatcaatattggatttgccaatgccaaagaatttcacatctttctccaccattacaacgaacgccattatgctaaatgttcttggagacaaacatacaaaagataaagagctagaaacttgcgaaagagcattggcgactccaggttcctcagtgtacttatatggaaaagagtctagacctaacagaaaagtaggtcacataaatattattgcctccagtatggcggaatgtgaacaaaggctgaactacattacaggtagaactgatattccaatcaaaatctctgtcgctcaaaagttggacttggaagcaatggtcaaaccattggttggaatcatcatgggatcagactctgacttgccggtaatgtctgccgcatgtgcggttttaaaagattttggcgttccatttgaagtgacaatagtctctgctcatagaactccacataggatgtcagcatatgctatttccgcaagcaagcgtggaattaaaacaattatcgctggagctggtggggctgctcacttgccaggtatggtggctgcaatgacaccacttcctgtcatcggtgtgcccgtaaaaggttcttgtctagatggagtagattctttacattcaattgtgcaaatgcctagaggtgttccagtagctaccgtcgctattaataatagtacgaacgctgcgctgttggctgtcagactgcttggcgcttatgattcaagttatacaacgaaaatggaacagtttttattaaagcaagaagaagaagttcttgtcaaagcacaaaagttagaaactgtcggttacgaagcttatctagaaaacaagtaa
